United States Patent Application Publication US 2026/0058010 A1 - sequence listing, part 33

SEQ ID NO: 408 - DNA, 1128647 bp, Homo sapiens
  source 1..1128647: mol_type = genomic DNA
gaaggtagagaggaagaaagtgttctaggccagagttgtacctcccaaaaagtcgagtcagaaatatgggaggccaggctaaagaaaagtaaagaaattagtaggattggatgtttgaaccactttctttcagtaaatcgctagaagcaccatgcagggttcaagtgaacgtatactggaggccagacctgcccaactatgctgctaaatggtgatcttctcctgaagcgctccatcagggtatgagtaacagggaactccccttgccaagacacacagggagtgtgatgaccctgtccctccaaactgcactttgagagaatggaaccttgttttgtagccaactatattatgccaagaacaaaaagatctttgtagcttatcatctgtttttatgttttatataaaaatctaaagcttctatgacatactttcaagaaactgctagaggcaacacgtagaatcccagagtaaagatattatgaagttagagtactttaaaattcttcagttctcacagtgtggatctatcgcccattgaataacaactttaactgttttatgaggtcactgaatatatttttcactataaaagaacatgagagaaaatatttaccttgaaatgctaaaaatgtgttccctttctgtggaatggcatttgttgaaaggaatatcccgggagaggatggattcttgttttagacatagctctttaaatttggcaggacatgtgggggtagggggacagatgggggtggagttgggggagcttggtattcaggtggcacaataccaggtggaggttaaatacctacaactccttatgcctgggatcttttgttccaatagccatagaagcttctttcatttcactttttatttttattttttgcaaaacccattagttgacaaagtgccataaactttgtacaaaatggcctcgttcagcaaatattttattcaaactatgctcctatcagcagtaccacacatgtcataaagtcatggtgaagcaggaatttcagtaaaagaaaaggcgggggtcatgaagaccgaaggatcaaaggagcatggagtagaggaggcgtcacatctgaagtgcacactgtgtgtgcgcgctgcaaggagagagagcgttataaagttgttgttttaatcgctgcttgtcgcctgcgaacatgttgctcccttttaagtgtcaagcaacgggttcacccaaaacttttctgcaccgaggacccgcacgcccggggtcccacctgcccctctctgcctgcctcccaccggcgcctgggcatcctgcgccggctacaggtccttgctcactgaagcgtcacctctcactccccagtaagcctccgcagcccactcggactgcagcctgtttgccgcccgtcctcccattgcagcactcggggcgacagagagggaggaggcgcgcggggacggggacgcccaggaggacccactcgcgggtcccgctccgctccggcagcagcatggggaaaggacgcgcgggccgagttggcaccacaggtaaacaggctggcgaggcgcaggacgctgtcgccgccgcggccacccagcgatttccaggcacgcaactccgcctccagggctctctccctcgcgctctctcccagccgcttgctcgcagccccagcagccgccgcagcatcacttcacacaaaggactgtcacccgcggagcagctcctccacctccacgtcctcctccggtgacagcagccccgacagcagggctcgggcgcggcggcggcgcggggggtggggggacctgtcactccctgtaactgaggcggcggcagcggtttttttgccttttctattttgccttttttttttttgcccttatacctcttcgcctttctgtggttccatccacttcttccccctcctcctcccataaacaactctcctacccctgcacccccaataaataaataaaaggaggagggcaaggggggaggaggaggagtggtgctgcgaggggaaggaaaagggaggcagcgcgagagagccgggcagagtccgaaccgacagccagaagcccgcacgcacctcgcaccatgagatggcgacgcgccccgcgccgctccgggcgtcccggcccccgggcccagcgccccggctccgccgcccgctcgtcgccgccgctgccgctgctgccactactgctgctgctggggaccgcggccctggcgccgggggcggcggccggcaacgaggcggctcccgcgggggcctcggtgtgctactcgtccccgcccagcgtgggatcggtgcaggagctagctcagcgcgccgcggtggtgatcgagggaaaggtgcacccgcagcggcggcagcagggggcactcgacaggaaggcggcggcggcggcgggcgaggcaggggcgtggggcggcgatcgcgagccgccagccgcgggcccacgggcgctggggccgcccgccgaggagccgctgctcgccgccaacgggaccgtgccctcttggcccaccgccccggtgcccagcgccggcgagcccggggaggaggcgccctatctggtgaaggtgcaccaggtgtgggcggtgaaagccgggggcttgaagaaggactcgctgctcaccgtgcgcctggggacctggggccaccccgccttcccctcctgcgggaggctcaaggaggacagcaggtacatcttcttcatggagcccgacgccaacagcaccagccgcgcgccggccgccttccgagcctctttcccccctctggagacgggccggaacctcaagaaggaggtcagccgggtgctgtgcaagcggtgcggtaagttcctcgcccttgggggcgcgaacccgcggcgaggagggcgcatcccgggcgcgcgggcagcggggctcgacggccgcccgagcaaggcagaggcgctctgggtcccagttgttggtttcagggtggtgggttctcagcgatcctcagagagggaggtttcgctttctccagcttcccttgtcttaggctttgccactggagaaagcccaagtttagtcctgggttggggcctcctgaaactttttaatcctttggggtttggctcaccaagtagatcggaaatgtgccggctgctttcttgtgggtgatatgaacttggctttggttaggagttgctgattctgggcctcctttgaaggaggaagggtgagtcccgcaggattttaacgccttcccttcacttggagtccagagtgtggagatggttaggggtttgcttctgtgtctgtgaagtctctgcaaggaaggggcagtgcactgacattccccgacagatgtggcagagttttttggcaactcaatgtccagcagagaggtgcagtctgtaccttgtgaatatgtgtaatatgtgagaattataaagttgttattggtgggggtttttttttttggccaagtcatctcaagaaattttgttttcacaatattttggtttggaggatgtttttgcacttcactgcatcagaacagatgaacgaaattatggaatatcacatgtaggccctgaagaagaagaattttggaagtttagcaattatttgctacaccttttcccacttaccactgaaaagtattcttcccgggtctgcttcatatgatcaggtttgagaaattagctgattatctcatttcgttgctgaggtagcattatgtttatgccattcataaactaatttctatgatctaaatatctgtataatttcctgattactatataatcactaacacatagcggggtttcttctcaaacagtaaattaacacgattacacatcacaaattccaacatgcataatagcttttccccctggtctttatgtatccgtctaatagacgtttgggttaattgaatttttataaaactcagcaccatgccaagcagagtctgcctgtgatggagagtgtgtcagttcttttaaatttgtgtctggtgggggccaattatttaaatttctggttggcatttgtggtggttaagtcctgctgttaattaatacctgatgatttggttttaatgacagcaaagatcattgttcacccaccattcccttatctgaacaatgtactttgtatgccagagacctgttaggattgcaccactcagtggacagaagctgttcagagagtggtgctgaagaaagctaagtggcatagggattccccgagacccactgatagatgtcactccaaagcatgggaaatgctctgctgggagctgtcttattaggcaaccgaaaagctcagcaccatcgtactgcagcatatgttactctgttacagaatctgaaacaaaaccttttaagcaacaccactgtccagttttcatatgttttatagtgtgtaattcaggaaggatttttcctttatcccaagtcatgagttttgaatcattcacaccacatggtgggaagttaatataaaggggattgtagttagctgtgatgcctaggattgggggtgcattactacattatcaattgtgttagttataccttttaactagaaataaatgtaagacttgagaggtaaagttcttacaagcatccagagaatgtttggaaatggaaaactcatgttgtttggaggaatcatattctattcttgtgcttctaaggggaaaaaacttcattgaaggtacttagttttgtccctcagtttgccagtcaaaagaaatataatacatagttgtaagttgtggcacgttttaaaaaaatgggtttttaatgagctggagatctttttgcatgtaatcgagtatgttaagaaatcacaaagttactgccctggatttctgtagctattgtgtgtgcttggcgatttttgtgttatatgatttaaagtaggatattgcttttaacctcaaatagatttagctaagttctaactgaaatcatgctaaaagtttctcctcgcatttttacaaacatagtgtttcttgtaaaactggaggataaaagcaaataatatcagctattttatatgatgtaaattcagtaaatctgcacttggaatattgagtgtaaaagtgtgtgtgtgtgtgtgtgtgagagagagaatgaatgaatgtgtgaattcatccagttgtgtggtgtcagataatgccattcagaatttgccaggcaaagaaacacagaaaaatggaaaagagagagagagagagaactagcaagaggaaagaatgagaatgagaatgggggctgatttgttctggttgagctgcttctggtcagaagatttcagggagagtgatggagcagaaggccctcacctaacatgaagctgccctgggggcgtgatggttgtgtgcaggcttgagccataatgctaggctggagaaggaatagagcaaagtcattttgtgatatcatacccaggggaacagtttccagctctgctgctctcagctgctgtgttgtttcctacaagttgtttgctagtgtagaaactacacatgcaacagattagccttagggttgagttaataaaaatctttcctcttgaaattcctttttctctttccccctcatctaatataaactccggaataatgtcgataaaacaagaagctctttgaaaaatggacctttggaaacagaaactatgagtgtattttagaagacaacatggaaattcatagcttaattgctttgtagttgaagtttgtataaatgacacttcctttacagttatttaaagtgtttgtagtcttcactttttctgttgctcactgaacgacctaagaaatatccttgggttttatgttcattggaatgcaggataatttgctgtccgattaaatctctattattcaaacaagtcattgtttgatgtgctacacttttagcttccaaagcattgtggttatatgaggcagaagctgatttccaaaaaggagtacaaacactgaggttgaataacatctacaattgggctatgccagatttgtacatcaattctgatcttacaagccaatataagtattttatatcatatgatggtagaatgaagatgtatacatgtatgcatgtattgataatgtaaacatctttatcaaatatttatgatacatagcacttgctctttttaatatcttcagtcactatttaataaagtgtgctaaccttatggtgttttgaaaatgaaagaaaatgctgcagagattttccagtcagcattaaagaaaactattcttaataaaagctatattaaggaaatagaaacagtaacagatatagcctgactgcttgtatgttgtaaatacacatgtaaatttaatttcccaagtgtttgtgactgctctttttaaactttataaatcttgctgtcaaaaatctataccggatttaaaatagctacttctactgagtagagaaactatgtatttatttatatgtatgttaaaaatgaaaccaacataggtcatttgggagaagaactccttagaataaaaatattttaaaaagtggatttaaatatctgagttagaatatttcactagcactaggggatcgttcttgttgttgtggggtatctataaatcctctgaatgtagggaaagtcttaccatatgtcctgatgtattaagtaagactaggagctttagacaacagagaattaaaacagtgagctgtacttcctctggcttgtatatttatagcaaatgagagcaaaagatgtgattgggcgggttattgcccttgtcaaatataatctattcattcttccggaaatctcctttgcttcgatacctattttcttcctgtttttttttcttaattataaacataatgtcttttacaaccctcttgtacatttcaatgacaatttatgaactgcttagatatccaaagatctctaaatcctcatagcaatacttagccttttatttgttttaaatatggttgaatgatctgaaaaaataatctcttttgatagctcttaatgaatgggtattttgattagctttgtatagataaatgataatgaaaacaaaaagtatacaattagggttcttactgattcaagcaatttgttaccaccccaaaatagtgcaacatggcttagtgaaagtcttcataagaaagtaaaaactaatttacaatgttcttatttcctaatcacagaaatgggcattgtggacagttttcaaccaatatatgaatactctaaatttgtgcatacatattgttactccgcttttatgttataacatgtaagttaaaattactattatgaaagaatatataacctggctagtttacccccaacctctccagaatatcagtcgctttatagtacttgaacgtttgcttagtgacacattctgttgaaatctaatgttgaattatttgtggatttacagaatatacaaattcacaaataattgtatgactaagacaaaacttggtcattttaagttgagggattgtcctagttgagaggttgtgttttcatattgcctaagttgttgagtgctgtagtgcacttcaagtaaatctgtttctgaagacttgccccctggattttcgtccctaaattatccatacaggttgaagcagataaaatacaagaaattttggtgaagttgaaggttaaaaatagattgactagtctcttcttggcatagatacaattattaggaaacagttctccctaatacagacttgccatccaggcatcctagagagagatgcatatgtggtaatttacattaatttttggtcttcttcaggagaaccaggatatttttccctacggaaaatagtttgttaggaagttctttcctggcccttgatttacctcatttggacctagtaaaatttatactttgttttaaattacaactaaaaaatcaaaaagaagaaatgttacctacagtctggatggaccgtaagagactgtcctactactttctaactcagacttctgtgttttttcttttcttcttctttatttcccctatgaagatactacaggggaagccttgggtaaatgatggggcccaggagtggattgtagtgtatgagtttaggattgctagtcattatcatatggactagccttctctcgaaaccttgaaattcagctgtccgggtccaaggaatgttggaaaatagaggtcttagatcacaagactgtgaatgcaaatggtctttctgtttctgatggagtctttgtccatcccatgaggacgtggatggtaacctgcattgcatctctagttcagaggctttctctccaaagcccaaggctctgtctttggacatctgccctggcttgctgggaacaagaaaacagctctgagtggtgcatgaatccggagctagtagccaggtttatgaggtagcaatggtccaagggaacctagaggagggaattgtttccttttcttttgctctgctgtgctagaatatgtgagctgaatcaagcccagtgcaagggaacatacctgatgagggcactagagtcttggtactgggtatacctaagagcccaggggatggacgagggataagaaatgtgaagtactgtcagcttcactaaatttggaaaatgcataccagtaatactatcatcccaaatggttgtcttttatctgggaattgccattaaggcaaagatagctaaaaaaattgagggcatactaaaaccacatagttataactaccacttatggagttggtaaatttttttggcctctttgatagacacatagagtttgatttttatgtgtagattaaattcctgttgaataattaatgaataaatgactgaaggaccccagctggttggatagtggaaatcactgttctagcctaaatttagaaagataaaaacatacttttgatttttttctcttctcatctctgatatggtgagtttgataccaggacactgttcccttctcttcccatccagagccttactgtaatctggatcgacctttggggcttcagagaaaggttgtttaatttcccaaaacttttccctcacttatttttagaacaatatttgttctgtgtagcttatagcccagcaggaaaaaaaaattccagtgttgtaaatgcttaaaagtacagaagagttttgctgtagtctatgaacccttaccactgttttcagcagaaccatttgtaaaccatcccagtttattttgggtgacagacttcagtattcagaaattttgtgttctccttggatctctcttcacaggtgtttaaccatctcagtactgtaagtgatactttatgttgaaattcattctcataactgaagatggaaaaacacagcttatatccctaagaagtaatacaaagaggttttagatcagttcctctttacttatttttcttgtttccaatatcacaacagctcttggtttacctgcaggtggggtggcatgtgcccatttgggctctgatgaataatgaggttctttgccttcacttcctcagtcggccctggaggcactgtgggagatgatgtgttatcagtgaagcagcagatgtggtggcagcattttcctccactgcagggagcatcccgtctgtacctctgtacagagcaggggagctgtctactgagaaggaaatggatggctgtgtttgcttcacatagaatttctcattagccttgggaagtggttctggcagttggggccccttggtggttgccaggatggagaggttctgctcagagtgggtgtgctcattgtcctgtcatctgcacaaagggccacagcattgagataacctaggcatgctgctgctttgcaagcccggacacctccggacaatcctttcctctgttgtcttcattcccatccatagagatgggtcacatcttgtcctcaggaacactagcacctttctttttgttggagcagaaattttataaaacaccctagcattttggaatatagttttattccgatgagcagtttagaaaaatttatggtaacataaaatttaccattttaaccatttttaggtgtgcagttcagtggcattaagtatttgcattgttgtgtaaccctcactgcaatccatctccagatattttatcttcccaaagtggaaactctgtattcattaaacactaactccccattccctttcctccttttccccaatcaccattctactttctgtctttacaaatttgactactctttttttttttttttttttttttttttgagacggagtttcgctctgtcgcccaggctggagtgctgtggcgcgatctcgactcactgcaagctccgcctcccgggttcacgccattctcctgcctcagcctcccgtgtagctgggactacaggcgcgcgccaccatgcccggctaatttttgtatttttagtagagacggggtttcaccgtgttagccaggatggtctagatctcctgaccttgtgatccgcccgtctcggcctcccaaagtgctgggattacaggcgtgagccaccgcgcccggccctacctttcttaagtgtagagttcagcagtattcaatacattcgtaatgttgtacaactatcaccatcatccatcgccatactcttgaccttgtaaaaccaagactctataccaattaaattacaacttctcattttctcctcccccagccactgacaaacactattctactgtttgcctctctgatttttactaagtgcatcatttaagtggaatcatatggtatttgtccttttgtgactggcttatttcacttaccataatgtcctcaaggttcatcatgttgtagcatatgtcagaatttccttcttttgaaaggctcaataattttccattgtatgtaaataacacattttgtttattcatccatccatccatcagtggacacctggtttactttcacattttggctattataaataatgctgctgtgaaatgtcttctcaaatccctgctttcaattttttgggtatatacacagaagcagaattgctgaaacatatggtaattcttttttctttttttcttttcttttttttttttttgagatggcatctcactgtgtcgcccaggctggagtgcagtggcacgatcttggctcactgcaacctccacctcctgagttcaagtgattctcctgcctcagcctcctgaatagctgggagtacaggtgcatgccaccatgcctaagttttgtatttttagtaaaaatggggtttcaccatgttggccaggcaggtcttgaactcctgacctcaggtgatccgcctgcctcggcctcccaaaatgctggattacaggagtgagccatggtgcccggcctcatatggtagttctaggtttgctttttggaggagctatcatactgttttccatagcagctgcaccattttacattcccaccagcagtaaacaagggttccagtttttccacatcctccctcacacatgctattttctactgttttgatactagccttcctaatgcacgtggagtagtggtgagcagtttttatattgttgttgttttctatacagagttagtgtctctaattacactgtcattaacaagaagcaaaagttctcagaaaagagaggtgttcatttattcaactcttagtttaaatagcatgtaagatcctgaatctgaaaccatgaaataaggaaattacaatggataacagcttaataaaaacaatgatttaaagagtaagcttagaaataaagaattgagtaagcttcgatttaaagaataagcttagaaataaaaacaatgaaagatgtaaagaataagcttagagaatggacttacagaaaacagtcctccaaggtcatcatgagaatattgtatttttattcatattgctatcagtgtagtccagaaaggaaccttatcatactttgattagtttcagaaccttttaattgatttaatgtattcattaattgcctctaccccagcaatttccctgtctgtattcctgtccattgccccaatccccttctaatcagtacgcaccagaggctgagtcattctaaaatactacttttttttttgtttgtttcagacagggtcttgctctgtcatccaggcgggagtgcagtgggacgatcttggctcactgcagcctcaacctcatggactcaagcagtcctccacttcagcctcccaagtagctggtatcacaggcccatgccactatgcccagctaatttttgtattttttgtagagatggggttttgccatgttgcccaggctggtcttgaactcctaagctcaagcaatgctcccacctcagcctcccaaagtgctgggattacaagcatgagccactgcacttggcctgaaatgctacttttcttaggccttgttccctacttagaaagtttcaatggatgcaccatagttaactcaagatctcaacattcaatatcctccttagcctcaataaagccttatctttctcaccttcccatatgaacacttcatccactctgactgctccctgaacaggccaggcactttcctaaccctcctgtttttacatatgccatttcctctgcctcgatcttcttccaccctcatttctacctgtggaatttctgttcttccttctagggacagctcaaatcctactgcttccataatgaaactagtaatgattcctaccagggatatgcactctagaatttgaacacagagctcctctttcctgtgtaccttacacaaggtactgttacaaattttccttctgtcatattgtgtttgttacaatgtatgtattttaaaatttttctctgtttctgtgtgtcttgcctcactggcagccaacactattcttgtgtttggatactagcagggtcttcagcttacttgccagtgaaaagtgccctggcctcgagtcagaagaatcctttccactttcagctttgtagttagtacctgtgtgattgtgggtcgctgactttattcactcatttgggtctcagtttcctaatatgcaaaacgagaaggtaaaatgcttttcaaggtccgtttaaactgtatttggtcctcagaaatgacccaaacatagaaatctccttcttctggagctttttctggagcttattttctcttcctctcctcttatttagtgttgttctcaggagaacacatgtgggaaaacaactgtgaaacttttagacactctaagagaggagaaagagagctgaatgagagggaaccttcaagggaaggtgtctcttttctccaaatcttatctccatggcctttttgtgtcatttaaaaaaatattaacagttatttgcattcgctggcatcgtcttttcaaaaagcaaatatgattgcctctgcaagcctgtctttgaaatgataaagtatgattaatccacagctgtattctttagaatgagaaagttcagtcatttgtggtgctaaaatgaaaaaataaagatttgaatggttttactatttactgtgaatttatttttacaatgtagatggggcattgttttaggttctaataattagcactgttgctgaaatggatgaggtcagcacagagagtgtggagagcttggttttcaggggggtggcagcagttctaatggctgcagggcgaggcttcctgctgagatgccagtgttgggttctttctcaaattatgatttttatggtttgggcaagaaaaggatgcatttaagctcttttataagtaaaatgagcaatgctgaaacagttgtcaaatgggaataatttgatctgacttttacaatttctgcatgaagaggtattggcagctccatggcattggggcaggatgggcagggcttagctgggctaggtccattttttttttccttcagtttaacgtctccgacccctggtggattcacctactgcagaagagccaatgctgcttataaattatgtttcctcaatctatatctctagcccagacctttctttttggctctctatctgaacatctaactacttacctggtaacttatgtcctacaaacactttatgtgaaatattttaaccagtgcctcatctccactgccagtccctctgcacatttgtatcctaataatgactctaccctcactgctagtatgatcaccacagttattcccagtgacttccttggtcgacacttatttggtgccagagtagtaggcgctgagataaattcagttaacccctcaccatatggcagcattaatattttttagttacctcaaaccagatacctctcctgctccataccagattagtgaccacatcccactgattctacgtccttaacaaatctcagattcgtcccgtcttccctcacttcaacttctctgtaatagattcttactgcaactgtaacagcctctttatgcatggattctttccttctcacatccattttctatactgttgctagagtggtctttctaaaatagaatagatggtactgtgcttttacctaaagcttttcggttgacatcaggataaaactcagacccctttgaatggcatgtgagggcttttggcttttgtcccaagtgttcttgtccagttctttctcctatccagaaccttgtgctacactgatggcattctctacatatgccaggcagctttagggctctgtggatttgcacatattgttctcttttcccagaatggtctgcttctctatctacctgtttgttgtactgtcactacctgtcatttcagattgactgtccttccgtggaatggttaaataacactggatagccctataacggattgtgctatagtctttacaaatcttcttgtaggagaaaatatgatgacttagagatatgtttatattacattgtcaagtgaaaagtgttgtataatacatgtgtgattgacttttctttctttgcttttccttttcttttctctttctctctctctgtgtctccctttcctttcttccctctttctccctcccttcctccctccctccctccttcccttccttcctctcttctctcctctcctctcctctcctctcctctcctctcctctcctctcctctcctcccctcccctcccctccccttctctcccctcccctcctctcctctcctcttgtcttcccattgatctttcaataaaaataaaagcctagaactctatgtagctaaacgttaacagtgtttatctctgggtattgggattattgatctttagaatgatcttcattttgtattttctaaagtttctataatgaatgcacattactttttaacaagaagtagtaaatgctattttcaacaaaaaatactgacttgtggcaagtactatgtcttacttatctttgtctttttagaacattgccttcctcatggaagatgtattagttagggtaggctaactgcagtaaccgatgatacccttaatatataacaagtaaaatgcgatagtttatttctacctagtgaatgaacagaacacaagatgttctggtcctgactttcccctgaataaaatctgcactaactaacaccgaggcatagccaaacctcacctccagaccaaattggctgaaataggcagggttccaatttgtgacggtcatttatttttaatggcctttctattccctgaaatgtagacaaatttgccctttgctgcctcattgcagtggaagagcctcatacctgtgtgcagagctgatgatgaaaggcatctatgtgtgtatgtgtgttgtagataaatagtgtattaactatgtgtaattccttatttcaaagtagcattttatgggtgagttttgcaataaatcttcaacgtttaatgctcactatgtcttgtttcatttgatatcactgaaaatgcagagggtcaggccacattcactctgtctctccctggcatgttaggttgccttctagagctctgtgtttcacaaatcattttgatgtagagactgtggagaaatattctcaggctttatcactgctgacttaattgagtttcatgatgcgcttttttttttttcatagtaggataaattaaaaatggctgataaagctgcctgtaaaagcaaaattgttaggttaaacctgcctggtgtattaaatgtattgataagtaatttggccaccatttttaatcacttttattaactctcaagtagttttatttccagtaacttgcaaaataactgtcattatggactcagtcatatttctctttaaaatactattgaaaagtccatgaaaatgattaaagtgccaatatcatccacctacttcctgttagcaagaattgttggtgattttgtgattagctgagtatatggttgtgctctctttgtgcaacccaggaggaaatagaaccagttcatcccaggtgaatagagataatgaatgggtttgaagccgtgtaacaggagtagtcttttgtgcatctgtatcatgtatgttattgttatgctgtctttaaaacattttattaaatattgagaagacaagatacttgtgaattatgtgtaaagtgtaaagaatcatgatacgtgtaatgtgcctttcggtgtcatctttgccatcggctgttcggctttgtaaggatcttgagttcaaggtcactaaagaacagcttaacacattgtcttgctcacaggtcaataagggatatatctcttcattaaaatggatgagaagtttgtcattactttactgcttcttggctagatgtgtggcttatgcctgtaatcacagtgctttgggaggttgaagcaggagaatcgcctgaggccaggagtctgagaccagcttgggaaacatagtgaggccctgtctgtgcagaaacaaaaaattaaatttgccaggcttggtggtgtgcaccttcagtcctagctactctggaagctgagtcaggaggatcccttgagcccaggaatttgaggttacagagagctatgattgcatcactgcactctagcctgggtaacagaataagacctgtctttaaaaataaaaaataaaaaagaattccctgtattttttccaatccatttgcatagcctccaaatcccattcctttcccctcagatttcggcattcccaccctatgggagaaattattatagttgccattcttaggatgtttcccagataaattacaggaatcataagattgctaaacaaatgtaggtggctaatagaaaaagagaagcagtaagcctacttttttcatttacttattcagcaaatgtttatcaggcatctattatttgataggctttgtactgatttctggcttgacaatgatgaagaaattagacatgcccctttctgagctaagaagataggcaaaagggttacacaaataattatataattacagttgtgctaagcctcatgagggaaaagtacaaggtcccagccaggtgaacatataacagaagaatctatcttagtctgaaagatacaagaaggtctttttgagaaagaagcatttctgttagggtagggaggaggggaaaggaggagaggaaagatttgcatttccaaccttggggcagagaaggtgaggaatagcagaaaggacagtcagcacaaaggaagcaaaaatggggtctgagaagtaaggaacaatcagacgattctagacttccaggattccagattttatcttaaaaacaggggaacccaatgaagggtttttaagaagaggagttatatgcttgtcatttcaaaaacatcacaactgctggttataaggagaatggactaaaagggaataagagtgcatgcagggagctgaggtggggccccagttgagactggatgtgtgcctggactagagtgggagctacagaagtgaagagaagtgaaagatttgagatgatttttggaagcttcttttagccttggctgtgatggggcaatgcctacaaagggcggtggggaggatggcccccagtgttctggcttgagcaaattgtatgcacagtaggtgatgcgatggcaaatactgcaggagaagaagcccttgtttagtgtattgtcgacatatccacatggaaataccaaggaagcatgtgcttgtttggagctggaggtcagaagagaattccaggttgtcttttgagtgtggtggttttggacaaggacatgacatttctagctccatgaagtagataagattgcttagggaaggtgggagagtgtaaggaaaagtgaagagaaaaggaagcataaggaacagccacctttaaaggtgaggcagagtgatgggaaagaagcaattagagcagtgaaaggaagacccaaaaaggattcaggagggaagagtggctgctgcatctgtgtccctcgaacatcctgatggaagaggaggaagacagagcccaaaccaggactttttgagtggtgactattgccacacattttaaatgtaagagtgcacattgcatttaggaccagtgaggacttaggacagagttctggccaatgccagaggtggagcccagaccaggagcagactgaagtactatttgccaacttccggttaagattgggttttagtaatatttttatttatctggacataagtagcacaaagctgttttaaatactctgaggctttctttggtggtgggggataagactgggaagaataactaatttgagagacccaatggatagtttgtataaagatatgattttcaaaaaatcatcaaaattgattaagtgttactaacgtgttgctgaaggtcactcgtttatgtgtttttctcctgagctaagaattctttcctatgtaccacctaagccctttcagtgacaaattattgttcaaatttttcttggcacactgacttgagaattaactaccattcatagctggtacccaggtcctatgagaatacaatgccttgtcacataaatacttgtgaagtgacatctatcaatctaatttagaaaaatatttgagtcaaaaggtccttgaaccatgtattaggttgacacaggagctccctttatctgaagctgtgactgagcattttaatgaatggcagtcaaggaattcaaagttattattctgatagtaattgcgtgcatttttcctgcccatctatatgcagccttctcattgtctaggaagctgctgatttgatgcattcatagctattatttgcatagggaatttgaaccaccatgggaagaatgattttgaatttcctgttttcatttatttactttgggtgcaataacagtgttttcatggaaggattttttatattgggtttttcctaattttaatacagtgtaaataagctaagtgttatatttctgaaaaccacacgttacaaatttttaaaaatgggggaaagatgaaaatgaaataaaaagatgggaagacaagttctgaaacctctgaccttacctgcgggctcctccctctagttgaccatggagaaccatagatgacttactgggccagatattctgatcttggacagaccaatggtttgtaaaatgggttgcatattatagtgtgcaaattcctggactagacttccagagatgatagttcatgtggcccagggtttgtcctgagaatctgcatttttgaaaagctctccaggtgatttttagtgtgcacttaagtctgggagctcttggaattgtttttttcaactaataaagttgaagacaccctgcacaagattagaagatggataagaaaagagaattagaatttactgagtttctattatggctgaacatgtttacatatcttacgtcatttattctttaacaccatcttgcaaggtatatcattttgttccaattttaacctgagattcaaaaaggtttacagaactttaaaggtcatgcagctgctgggaggcagaacctttatttgcctccaggtcatctgatctgctgtgtagaaccacgacaaggctgggaacaagaaggtctggatagaattctagtcacaccatcacttgggtgaggtccttttgccctctctgccaacgtgggtacctgttgctaaaggtagactttcctgtttatcatcaaagagtgcctataggtagatgagtggggaggactgcatacattttgagagtagtaaaatcagatccacttggacaaaactgtcttcaatattctacaatgaacatgccatgttattgtgaccagaattgacattgtatctctaccctacgctgacaagttgattgtctgagcgaggaaacagcactcatcatacatttatatttctccaggaaggaaaagagacatggtagagtctagtggggaaaaatctggcttcagattggacttagtacttgaattaagggtcaggcattggcttctacctctcactctgtactcatgaccttgggaactccatgtttctaaactttatttttagttttctctttgtaaaatgagaatgatgtgtctctctcagatcagtgagtaccagctgagatcatgtctgtcgagcacttaggcagtggtaagtgccttctttctttctttgttttgagacagagtcttgctctgttgcccaggctggagtgcagtggtgcaatcatggctcactacaaactctacctccctggatcaagcgattctcgtgcctcagcctcccgggtagctgggattatagacatgcaccgccatgcctggctaatttttgtattttttgtagagacagggtttcactgtgttggccaggctggtctcgaattcctaacctcaagtaatctgcctgccttggtctcccaaagtgctgagatgacaggtatgagccgccacacctggccacagtaagtaccttcttaatgttaatcagcagagggaagggagagtgactctctgcagcaggattcagtggagctagagatccagactagcaatagcagcagaatgaagatgaatcttgactacttgattgctgcatttttcattattttaggaacccagcggttctcctaaaatgcatgccaaaggtcctttgacagggtgctgctccagctgtggtttgtcggtctgcagtgttgtaccaccctggtgctcattaggactgcaaattcccaggtcaccttcagatgtaccactctccagatgtttctcatgctcactgcagtatgagaagcactactttaacaggcaacctccttccaggtgaatcatgtctggagaagttgcttggtcagagagatatttgtccaggctcagccatgctggctctgcagcgagggttccttcactagaacaccatgcatttgtggtggcagcataggtagaaggcactgagcggaaacaagaggagcgagatggagaaagaaaaaaaacaactttcccggaaaagttaaaatgatagcatgacctttctgaatggactttgggacatggcaccaagaatgagcaataatgaaataccaaggaaggagactccttaggagagcatctgggaaccatgcaaccatgcgacaagaggtgatgcagggaagctggtgagagggtgaactgaggctcccccaggggcgaggggggatacctcctttctgaacctcatgctgaacccgaccctcaggagcaacagattggggtaggagcttttggagaggggaattgaaatggccttgttggcagaatgactctgaagggaactttccagcacacccaggaaaaaaacaaaacaaactccccaatctgccagactccactttcttaactggagggcagggtggttgctcaaatattttgggctcagggctttggaaagatttcttgtcttgctgcatgctctgtggaaccaggctgagagcaggatttttgcatttagaatatcttagcagaactgggcaagatgaaaaccaatctttttgtagctaccaaaaagtggacatacttcagctttctgtcttctccctgctgacttgggtgtatttggtgtgcttgctctgtgctaggcccttcctgtctcttatctcactaaatcttgacaatatccccagagattggcatcattatactcattttacagatgaaactgtctcagaggggttacggaatttgcccaagacacacagctgagtggtgaagctggaattcagaaccaagttcggcttattagaaagtattcttatatactacatgtagaaatgaaacgcaacgtatgtgacagccattataatgtaaataataaaagtaacaggattttctccctgccctccgtaattcagtatacttgttgattatttgctgcttctggcaagctatgattgattgctgttctgtgggatatggagaagtttgaggaatttatgatacagctggggagaaaagacatattgatgcttgaccaggattaagccaccatatctcacaggtgtttagacaaaggagaaggcacctctgctaaggcacatcagggaaatctctagggaagatactgatttgacatagtactttctgggtatatagaattgtttcattttgtttgccgagtatgttaaaactgtttgcagggtgtgttaagatgatttgcagaagaatgttgcatatattattcgttttgatttggaaaaacaattaaaacaaggagagtcttattatttgccctatctttgggtaacttctgtactaacaaaactccggctcaccagccactagagttaaaattctcactaaagaaattgactaaatggaagagaatttatttctgatttcctttttaatgtaaacatatgtattgacacttttccttggaagaagtgtagtttctcttttagtagaaggaaatagaattatactctggcttaaattctattattataaacatacttctgtttttatcttgagataaggctttcctatatactgttgggagtctatagtgatatagtcattttctatattatttggccatcatttattcttttaaattcatttataattgtttttgcatgttttattgctaacatttaatagtgaccacccattaaagctattgcagtacctaagtatttataaatttttctgacatgttattgcttctggattataaactgggaaataattaagattcttgttcttgttgtaatgctgttatggtgatgatttagtatttccccaaacagtttatataatatggtctttttccacattggtatgtttctttatttgctggacagggtattttaatggttacatctaaatggaataaactcatagagctgttgatttgagaaaaccttctataatgccatattaatctatttagctcccagacctttcttagcagatcaaaggaatttcctggccactcccagaggtctgaccgccttttatctgttttaatgaaggtaattaaaattcctcagcttatgaaggtctggtcctggtcctaagtgaactagtccccagcagaatctgaaagaggactataagcaagccatttatttctaaatttttaaccttatatttctgtagatcctgattaaggtagttcctgcagtgtgagggcaaacttaggttgccagtattttagggaaatatgagttcttctttcataaactctgatgattattttgattcctgtatcattcatttgaaatgaacctgcaacactttgtgggtacataggaatgaagcaaatgcactctaaataattaaccagttgtgtcattgatttctactgataggtttatagcaaatgactttacacaaagttattaattaaatgctgtgttctgatgttgtctaaaaaatgtcatctggatgtccacagtttaaatcctcaacaaaatgttaaaagtcacagaaaaagtctttgacatagcatgacttaggatctccatattcatagttatttgttgagtaaatgtgctttgagcacttatcatgagccaaacactgggctaggtgttacagagacagtgctgaacaaagacctcgccaatatggtgcatattcccattttacaatctgtcagctcagccagtctcttaaaggccatcttttcctcaaacgagtttctgaaatgaaaatgaaaagagtcatttaaggatttaatctgagttctagtctataccctgaccacacaatgggcctcagggagaagaaggaacaagacaataccttactagagcaaaatgacttcccattatagaacatggtctggcactttcaagataaatgaagctgtaaagttaagttgtgcaattagtggacagagacaggtaatttgtgggcatggaggaggtttccaaatattcacagcaccaagtgatcaaaagctgtaagtagcatttgtgcacttttcttcatacattttacattaagaaaaaaaccatataggttgatattaagcagctaactgaaaatgaactgtccttaaaaagtaagtaaataaaaaacagcacttttcctgatgaatgaaggactgtgaaaaagctgttatgggcttagcctatgtagttcccagcattattttaaaaagatgaagaaaagaatgttgaagtctttgcattttcaatgcctaccaggtgcacctgccactcctgcatttctgggtttcacttttgtccattgctagctctcatttggtctgcaaatgtctgagtatctttcatgttccaggaactgtttgtgtgagatagatgcaatggtaaataagtcaaggtcgtcaccttttaggacctcatcctaccaacttaataggtgctagcagagactcgttgtgtgtctattataggataagtgagtgaaagtcctccttaggtaggtttcatcatctgcacttggatggaatgaatttatgaatgttcttagagacacttatagatctgagaaataaaaaacacataccaagaacttattgttgggatgaagaagagtaaataggggaattttttgggttcctcttctcctcatcctccttacaactcctcctgctgataagatatttagtcctatgattgacccagactgtcattttttggggcccttctctccatgcctgtggccaagccctgcctgggcttgtattaccagggatgactccacatgcttcttgcctgctattcacagaaggccctcttgtcttccgtgctcactgcgtggatggaacacccaggcaatgggacaccaggggtctgtatgtgctgcctgtgccagtgttctgagaagctccctgagactggtttggtgtaagggctgtcagtctgctccacaaacccagaataaattggattggaaaagtaggaaacctcatttagcttttgtgcctaaactttgtatacccaagcactgtttaccaaaaaagttctggatttggaagtagttaagtattcaaaacatattcaactatttatgaaaatgatgcttattattctatgtttatttctctcagcagggaagcccaaagagtaggggagatgaggagtaggttgtggaatcaacacccttcctcctgcctccaaaccacctgcactgcccaaggaggggccattcttttttgggagcccattatgtacttagctgtggatgagggtgtatgtgtgtcttatattcctgcttacattatggatagaagattgaaggtcacacttctgtgggtgtcctactgcacccaaaagggtattttacataaagcatgaataattgcaccttttcccccaaatgtcatatactttgatataacattttgtagagttaggagtcaggctttcatggggaagagggctgggttatgtccagttaatgggcaggcatgtagattatactttgcttttgataggtgagggactctttcaagtactattctacttcctctgtggttagtttttttctcccattcttctattctttttcatctttggggctgtacatcaggggaggagggtgctgcagtttgctattataatgggaaaaaatgagagagaaagcaaagagagtaggtaactgtactcagctttatttattttatccacacctcaagctcttattaggaaagggtgggttcttcttttctttttttttaggggggcggttttcttatagaataattactggtattctctggttgataagctaagagaaaagagagtcagggaaaagtactttactgtttttctatgttgtgttcattggttgtttttgtctgtctagtaccaaactttccaccaaccacataccctcttcacggttcccctccttccttctccaacagggaaaggcaggcaccagtggattcctctgtagtcaagacttaacataaccaggaattcttcctaaaggaagaagctatcaattagctaattatacttttcccatcccaaatttgttggacttctttgaagacaggatgatttaaatgagtggagaaggcttacctgggtggagggaagcagggagtaccaacgcatagagtgggaggaaggttggaaatatgagtgagagaaggtgttgatagtggaaggttgcagagaagttgtctgagaacttattcagagccagatggaggaattgttctactgattctcaagaagaattgagagttcttgcagcaattgttattatgtggttttgcaacttctctataatctcttataagagtagtttctcttagaagcctagtcagtatacctgaaactttaattccacttaccattataatgagaaaataaattgtcttattagattctgtgcaccaaggggcaagacctgaaaggaggatggaacggtgtgtagcggggatggcagttgatctgcaaaatcaggcatggaaattctgaactgttattggagagggaaaaggaacaagctacagttaactggtaaaactcagtcatattataggttaatcaaggccatagactgtgtgcttggtactatggaagataaagtgatatggaaagcatgatcagtgaccagtgggcttgtaatctaaatgtggagacacccagaccttagaaaataactatcccataggattatttttggcaaaatgtcaaatgaacaggtcatagataaatgatttaagaattcagaggaggtagagctcacttctacctggaagggtaagaataagcttttgttgacggggagaggctggaggtggaccttcaagggtgggtgggacagagatttgtcagcagacatgaatatggggtgctgggttgggcactttacacatcacagtgtggatacaacaccctggaaaaaccctatcactcccattttagagtaaggaagcataggctcagaaagtataaatatatgacccaaacttccttaaccattgacaggacaagttatagctgaatttcagacttaagccctctggctccaaacccatcctattccagtaccagtttgcctttatgaccttctatacacagaaatgctctgagaacaagaaagcaagtattttgcacccaggatggaaaccacatcattttggtaagggtacaggtcatttgggaaaaaatgagtgatgagtttaaacagtggtctaggtttggaaaaatagtctagaactattgaaggaatttcaggcagagaatgaggtcagccaaactatgttttagagagaagagctgcaaaaggaatgattttgtagatatggcaaatgtttatttaacttgtagcattttaaactagattacttttagcttaggtctgcatctgaaaatcagtgatttacgtagtcaacctttatgaaagttttctttgattagtcaatctagaaaagcataggctttattttttttaatttttatttctcatgcttgtgttttgttgcattgcgtttatcctggatgccttaatgaaatggtgcgatatgacccagggctctcatctgtttaactttgctaatttgctccattttcaaatgagtttccttggctgcaggagcagcagcagagcatgaactctgctgaaaggaatttcagttacaccgctactgccacctctggggcccccggataattttcttatcgtctttttgccgtttgggaacaaagccacgttgttcacgactgaaatacagtttttaaatgtgcctcctaccgtgtttttatagaaagagagcctcttctcctggaaaataaaacaccattgattgaaccaacagcccttcgaaagggctttaattattgcattaattacaaacttcaggacaaaccagggcccagtagtagggagccattgagcagatttctgagcggctttaaagaaaatgttaaaagccttttagatctaagaggctgaaattgagagaaggaggtgggcatgtgggagacactaccttcttcaagttataagctttgcattaaaaaatatcctcttccctctctgatttgtgtttcctgggaaagctccaatgactcattgctccaaggcctcaacattttctaccctgacattgatgagagagaggaaagtggggaggtggtctaaatgtcatagagtagaacttctccaaaaaaataggtcactggggaaaaaagaaatactcttggaataatcctttaacatgatcatcttcaaaatgctcactttttattctgaagaaaaagaagaaagaaaaaaggcaagtaatttctttctctggcaaaacattcactgaggtgttttcattcaattactttgatggttggctgttgggaaaattatcaaaagtgaatatgggtttgggaactactagaagattctcaaagttgctttttatgatctctttcccagggaaaataaatcattaaatactgaggtggctagatgaaattgaatgctacatctcatggtttattcagaatgggctcttccatctgacatccttttgacaggttctaccacatgtggcatttctggcaggtatgagggtaggtttcacattctaaaatgaaactggcagtcacacgtttccctggtttaaaacattttagcacttattatgtgccaaatagtgctctaagctgtcaacatgttaactcatttaatccttacaacaattttgtgaggcaggaactattataactatttagcagataaggaaactgagccttagcaaggtcacagtggagagcaggctgtccggctccagtgtctacttaattctaaccgaatactctgggagacaaagacgttcgtctcaattcatatcaccttgaatattcattgccagttgatgattgttattcttaattccctgcaaagactcaaccagtcaaacaattaatcaaatactgatttaccaattttctgggcacaagattaggcattaggagatgagtaaagatcccattcctacattaggagttcccaatctaatacagaagatggataagcaaatagggtgccagaggttggagtttgtggctcagatttgggagggttcatttatcaattcattattttaacaaagtgtagtgctagtatatgccaagcactgtgagtgattcccccatcccctgctcctcagtggttgcagtctgatcaggggagatggataagcaagcagcatgttgcattttggtgtgataattgctgtaattatgggcaagtacatgcaggggtactacatttgtaaatgtaccaagggaggtaatggcctgttcaggaaactgcactgtgacttagcatggctggagggtccagtgaaagcacagagaaggtaagaggtgaggctgcagaaggccccagaaagggttgggagtcaaggacattgtctgccatttcagagactctggactccattaggacattgagaatgttacttggtacccagcagtaagagttccttttcatccaagctctcatgtcactttaattgaaaagtagaaaagcagaaagaaagagtatcctaaaattaagcaatgataagacactgcaaatttccgaagattggaaattgccacttttatgtagagcttatggctattttctcgctggagacagactgaaaaagtgaggtccatatctgtgtctatttctgggatattggctcagcaataaagatgttagaaaaaataaaatgatggggttaaaaatcaacacatgtcacattaatttctgattcttctattggaagaggatcacatttcaaggtcaaaagatggagcagtgagatttgtagagagaaaatttatgggtggatatttgaaaattttctataagtaagcattgagaacattacgaagctaccagattttgtaattttcaaaattacaaggaatgtagtggaattggataatggatggtggaacctcttattcttggatcattggtttagatagatcccagattggcaataatggaaatttatttcaattttatgtctgctcagtggctgaaatgaagtgggttaataggtgcagttttgctttttgtggaggaatgccctagtcacagaaacccctaaagcaaactggcctttatatccccccagatgtttttccaggatgggtagtaacagagagggatatctctttgtcttggatttcctttatattgtgtgtcaaaatggacagtgtacaaagagtactattcaaaagtgtgagactaatctcagtttattgtgaaattcaatggatcacaaagtactgtgtccccaaaccaaaacagatgattggaaaattgaagactagatatttggaattgcttgaatgctggaggatggtgtgggcaggggtggaggcctgggtttctggcatgtaaccctaaagtcctttttatctttagtcttgtattctacctgagtagtaggtattgtgaaaagtatgttttctatgagtttacagatacagttcctggcataatgtacagcatatagcaggaatcctgtaatcattgaaggagttaataaatgatatcatcagcatagaacagtttggctgctttatgtataactcaggctactacagattgggtatctcttatgggaaattcttaggaccagaagtgttttggattttggatttttgtggaatatttgcttatacataatgagatatagaggggacgtgatctgagtctaaacatgaagttcatttatgtttcatatacaacttatacgcatagcctgaaggtaattttacataatatttttctttttctgttttttgagacaaggtctcgctctgtcaccccaggctggagtgtagtggtgcggtcatggctcactgcagacttgaccttctgggcacaagcgatcctcccacctcagcctccctagtagatgggatgggtctacaggcctgcagcaccatgccaatgcccagctaatttttgtattctttttttttttgaaatggagtctttcccttttgcccaggctggagcacaatggagcaatcttggctcactgcaacctccacctcccaggttcaagcgattctcctgcctcagcctcccaagcagctgggattacaggcatgtgccaccatgcccggctaatttttgtatttttttgtagagatggggttttgccatgttgcccaggctggtctcgaactcctgggctcaagcaacccttccaccttggtctcccaaagttctgggattacagacatgagacactgcactcagccttatacaatatttttaataattttgtgcatgaaataaggtttgtgtacattgaaccatcagaaaaaaaaggattactgtctcagtctcccatgtggacagtctgtggttttttggcatcaccgtcactcctgactctgaatttatatgctactgataagctttgtgttcttacacttattcacgcataagtacttaacagtaaaaaatatgacatgcatatctggtgtgcacagaaaagatatatcacagatgaaggaggctgggagggccttttttcccttggggacattgaataaagcatgtgtgtgcacctgtgttttgattgcgactggtcacatgaggattgggtgtggaattttccacttgtggtgtcatgttggtgctcagaattttcagatggtggagtatctcaggtttcagattttcagatgagggatgctcaacccataaacccatatagagataaggagtcttggtacaacatgtgctttatagaaaggaaaattttaggtctcagttgtagacttagagaaattcaggactaagacatttctgtgcatttagttccttttcatttttattttcctaccaccttcccccagccagctttcatctttttctctcaaagctctgcaaatcattgaaaaaattttccatgttattttttaggacaaaaacttactaaaagtcatccatccagcactgagttcttactcacgggggtcaccactgctgtgttctagttcctttgcttttgttttgttcactggcccctcctctccaatccctgagctcctacactgcaggccttcctttttattttacgttttacactctcccaacctgactttatcctttcaatcaaagatcattaataaatcttgtattgccattacctcataaaataagtattccatttaatcacattatctatgtatctgaaatcaggaagataccgaaaggtggtaaacaggaaatgggaatattggcagaaatgtactactgtacagctgagaattgtcattctctttgtttttttttttgtcgaaaataaaccttctgacagagatgatcagagaaagggatcataagtggtttcatatgaatatcaagattggctcccattacattttggcactaggtgttaagtttttatctctctgatcctgataggtggtggtacttggtgggcagtgtcatgaaaaccaagagaaccagggccttatatttcttttattttaacttgggtttttattttttttctttgcaacttttatattatgttcaagggggtgcatatgcaggtttgttacttgggtaaattgcatgttgcaagggtttggtttacaaataatttcatcacccaggtaatcaacataataaccgataggtactttttcagttctcacccttctctcgccctcaatccacaaataggtcccagtgtctattgttcccatctttatatccaagtgtactgaatatttagctcccacttataagtgagaacatgtggtatttggttttctgttcctgtgttaattcacctaggattgtggcctccagctccatctgtgttgcttcaaaggccatgatctcattttttttaataactgtaaggaactcaaatcaacaaacaaaacataacttgagttttgagaggtgttttctaccagatacttccctttgaactttgtatgtgacttcctagagagaaagtgtgttgaggaagttcactattctattctgcagtgagagaagacgacaggctaccagggaaaaatagaagatcaaaacctttttatttatttatttttgtttgtttttaaagtatctgtttccatatgtatactattgtgcaaccaattagttggggatagcggatttttatgtagctggcaaacttatcaggcagaagagaattatcatgtatatttcagcagcaatttatgaacaggtttgtttctaaaggatgcacatgtattttgggtttcactcttagtttcactctgattaatttgcttaataaatcttccttcttaaagacagaggagaggcaaacacaagtcaagcttttgttttagccagtagatttataattaatgacttttgttgatttaagaagctttctgaacaattcttggaatgcagtggtggcatcatgaaaggagcaaagggaacattttcgtgggacataagtaagatttaggagagggaggagttcacagactatcattaattttacaggaggagaaaatcaatgtcagtaggaaaaaagatacgtacaaaagatgacttctggatttgaggaaccattctcaatagcagaaaatagagctgttctcaagacatatgttaggtctctcacaatctatcagcaataaaaaaagatagcaatatagagatgaaagaggaagagagaagaaggattaagatcagctgtcaaaatgttgcatacaaaatgtattgaatgtcactattataagaggtcttactgtaattaaatttcctgtctatttggatttgctcatcttaaagctttttcagttgtcagtgtgagaaatgtttcctatctaggtgttttttcctccctgttaagtatcagcacagtgtaattcaccatagttgggtagggtggtactgagaatgtttcctacctcagcaagcctaatgtatatgattgctttttgtgaagagttttttttccatttctaccattaacaaggtgttagacacttagcttggtagtagacaaaccattagatcaatattcccagaactagagagttctgatattggcaggcattatttattccattaaaaaatgtcatattcatttaacaaagatggaatgcagatagtttcaccgaagccatgagtgtgataaaggctatagacaaaagattcctgtgaagtgaccatctggaccagtttaggtgttaggatttctgaggttcttgaacaagagctgttcctgctagctcatgttttagaacccatgtacaggaaaattgaggttgtgtttaaaaaatatggcatgtagcacaggaaatatgtgttttcagagcaaatgataacttaatattggctgaataatttgtaagaatactgatttttttgtcatataacctatatattttcttaaggaagataggtttataaggaaaaattgcaataattaaactgagcataccaacaaggaaaaataatttaactattatgatgactcatttagttggcatcctcgagtaatgaggtgctctagattaattttcctgagagcagaaatatatccctttaaatgattaagcattttatcttcatcaatctttgaataatatatttccaagatatattttacattcctttgtgtcataaatatgctttacaatgtatagggctagaatcatagtttttttttttttttaagagtttaaagaaacactgggagatcttggaaaataatattaccacattggagtgcaacattcttgtctctgatatatgaggttttgattagatgatcatcaaaattccttctctttctaacattctctaaataaaaagtcgtttatgttttaaattgtagtatatataagaatcagctagggtctttgttaaacttgcagatactcagacatcatccctagaggttctgatttagtagatttggtgggagagaagagaatccgtatcataaataatcacctagagccattctgatgacctcatttagagaaacactgattctctttccactcttgtataacagacaccattactcttgctggccacgtggtccttgaaaagatcattgctgctttaccctcagtggcattgagttgtgaggggctgatgagactaataactatgctttgatagtctttgctttctgaacctttcctcagtattacctgtcactttgttaatggtagctactgaggaaaaccagatcatcaagcttattaaatcagatgccctgtacttgtacatttaataagtcattgagttctaatcttaggtctgggtagaggcaggggaaggactgtctattttctcctgtagtctaaagtgcatgcatttagcagtgatgattatattccctgtttggaggtcttttactcttttgtcatgttctggttgttttaagaaagtcaagttttctagaagcatgacgtcagaataagtggcacattactctataaatatcttaattttcatggtgagattcatagtcaggatggtctatgactttcaaatattaaaaatttaaatataccataaaattctcctttaaagtatactgttcaatgatttttagtaaaatctgtaaatttagagttgtatgaagccaacaccataatctaattttagaacatttccatcatcccccaaaagaaatcaggtaactgttcccactcctaaatccagtcaatcaataatttacttcttatctctatagatttaccttttctagacatttcatatgaatgagatcatacagtatatgcccttctgtgtctggtgtctttcagttagtgtaaagttattgaggttcattcatgttttagcatgaatcagattgccaaataatattctgttgtatgcagttactacattttatttatccatttaccagttaatggacatttggattgtttccactttttgactattatggctagtgtgttcaaatctttgtgcagacatacattttaattctacttgagtagttttacctaggagtagaacttctgggtcatatggtaaatctgtttcaaggtagcagtttcacatgttacagttctacccgcaacgtataagggtttcactttctctacatccttgccaatacttattattattattggatacaagtcccttattggatatatgattttcaaatactttcacctagtcagtgagttacctttttactttctgaatggtgtcctgtgaaacacagtatattttattttgatggatccccgtttatctttcatctatgcatctgggtactttttttttttttaaagaggaatctttaacccaatactcatgccttcttgaggcttactcaagatcttgtaagctttgtttagtatgaagtccctagtgatacctagcatatagcacctagtttaaacagattacagatgaatattcaaagtttttgacctgaatttactgtagtcaacagttaccctaaagccttaaagattaccaaagccatgatagactcagccaccatcatgcaatggctatgtccttcgtagcatcctttcttcacattcatctttgctttcagcatatgaaggggggaatgtaggtctttaatttaccttgtactgtggggtagcactatcctttccttactccattttcaggcccttggatgcaggacccttctctgaggtcccacagaggtggaggcccagcctgagcttttacaggttttagagtaagatgtcaggacagcagttcacactcagccacatcccattaaaagaaataaaaaagtggctgggcacagtggctcatgcctgtaatcccagcactttgggaggccgaggtggatggatcacttgaggtcaggagttcaagaccagcctggcccacatggtgaaaccccatctctattaaaaatacaaaattagctgggcgtggtggtggacacgtgtaatcccagctactcgggaggctgaggcaggagaatcacttgaacctggaggtggaggttgcagtgagctgagattgtgccattgcactccagcatgggtgacaaaagcaaaactccatctcaaaagaaaaaagttgctgctgtagagttttgtcataagaacatactggctgcagtgtccataggcaaagatgaagctttactgagggctgatatactcaatacttctgcccagtccacttgagtctgtctttgcctaaatactaaattgtttgaattctcctttagttttagattttccctactgaattgacatggagaaatgttatcaagtccaatttgcaagaatgctggatttccacttggagcttttgttttcttgggcctagaaggcatctcttgtttataaaaaaacactgggcatcattgtacatgagaaacttaaagacagtgcatatctggtagcagttgatatacagtgtattattcctaaatgtagtaataacaccttacaattggaaaaaaaatgagttatagatgaccaaatgcttccataaatatgatcacatttggtcctcccatctctgtgaagaattattattcctcttttacaggtgaagaaaatgacttgtcagaagtcatttatttccaaatataggacttctgataccaaattttgtgccttttctgtagtgccatgcttcctctccaaagcaatagttgaatttctgcaattttaagaaaatcatatatgtcgtgttatattagacccgtggctaatctataagcagtcatttatattttaaatgaaatccattaatgatatattcactttctagggcttatttccatctcaagcttccatttctgattgtaatgtgtaatgttgcatttcctgtgaaaggaattccaggctttggattgtaggtgggtaagattagtggtgggtcttagagagtcgggagatcctgagcatgggaacagccttttgcccgtaagtttatactgtgctcaaagatagtctgaatagttttaggctgcctggggtcccaaggagactttatgcctcccgatagtaaattttgggtccccaaagacccaacaatatttccatgcgatcatagcttgaccccaatttatggatgcttccttcctttcttctttaatccttgacaactttcttccccaagatttcctcgtgtcagggacccagaggccattcttactatgatctctttcttttccatttcattccctatggcttagaccatttaggtggggcagtggttctcacagtgtgaaccactcatcagcagcaacagcttgttaaaaatgcaaactcaggacccaccccatatctgcttaatcagaaaggcctgggaggttgaaccctccagtccgtgtttgatataccttccaggggttctggtgcatgcgcacatgtgagatccacttgtgcagtggttaagagcaaggattctggaatcagcagccaggtttcaaattttagctctgccatttggcagctaccacttcctgccatccatttacctatatgatctttggggaaattactttcctctctagactttaatttcctaatctgtaaacttgtggaataaaatatgaattacctacatgggaagttgtagaaatgaaataaggtaatgcatacaaagtgtctcacgtgatgtctggcactctgcaagcatccctgaatgggagctttcatggttgatatggactctgaccctagtcattgcctgcacagtgcttgatgaccttcccttgcttgtctctagcagcttggcatttaactactcaattctaaacctgaatgtttgccatgtgctccattttcagtagtatgaaaatgagactagttttcacactaaaatccctgtatgaaatatatttgaaattttgcttaggtcttgcttttgttttctgccacccagccagtttcctatctgggataggacatcgcttttgataataattcaatatttaaagcctttgtttaagaatgtgtcttaagacatgtttaaaagtctaaataaacattatatcctgtctcaatttatctaccacttaaaaaatttcaagtgttttttatctatctatgtctatctattgatatagaatctatgtagggatatagaatctatggattctaaatagattctatatagatatggataggtttgatatccctatctgtggcttttctcctataacatttttctaacttaattgtcagaatctgttctctagtagaaaatccaccgatgtcagaggatcacttgagtctgggaatttgaggctgcagtgagctgagatcatgccattgcactccagcctgagtgacagagagaccctgtctcaaaaagttcatcaacatacagtatacttccaacaaatccacagtaaaatttaatgtattggatcattttcagactcgcggcagccagtccttgggctatttctatgagtctttatgtaactttgactacaaattcgaagttgtcctcaaatccactagaactcctggttggataccattcaatcctggtgatttattttacttttatttgtcagttaggcctagtacatcccttgcatttatttttcctgaatttagcatatttagactgcttacttcagaagagaatttgttttcaaatattctctttggtaaaatatacctcagaagttggatttattccctttcctatcttttattcatctatgtactgcacttatttttataagttcatctgattcttcagctggctttctgccaatgataaattaaaaaaaaaaaactacacataaacgaaaccaacaaccagaaaacccttttaacttgttatttatttatttatttattagcaacctttaaactctttgaattatgtcatgaatttcctctgacttacaagctcacagggcagcattttctaatagtgttttgttttagcctgaaataaaaggttccatggtcaagttagcataggaaaggctacatacttattctatgcccctttatcccctagcctctgaaacagtttagtaattcataattcacagtagcatttgaaacactctgagatgtcctgcatagacaaaccagattaacttggtttgacctaatttcccccccaacataaacacttattaacaatctgtgaactagtgttccttagaccacctttgtgtccattgaatttagaagttttcttattctcatttggcatagcttaatgtttttagatgtgctttagttttttcctctttacctatttgtttctatttggtttcttcacttacgctttttccatatatatttttttgacaagtctgtgtgacccaatttaaacttttctgatgacatttactttgaattaaaaaagattttttgttcattacttatcttcctatattctatattgaaatgattattttaatatttaatgttatagcatattaatttattaaagtattaaatatttatattattaaatttattttaagttaaataatcaaataatattgatattaaatatttaaatatttatatttaaataatatttaattttaactttatattgatataaaattatttaaatattgataaggatattactttggtagtactggtggttataatgtttttaactgtctttcttattcactgaatatattcactgactatttcatggtaggtttttaagctttattgcttttattagggaataaatgactaaagttatatattaacatttacatttgtaagttaatcttcaccataggtaatttttgctttttaaaatttgttgcagtactctatatttccttgcgatacttactctctttgcacatgcttcttcttttgcatgaaggctcttgttccagatatccacatgtctgtttcctttcctccctcagttctcttttcacctgttgtcttctcaatgaggctcatttttgctgctacatttgtttttagatgtatttgtaaacatctagacaccctaccccaacactacctattccccttcttgacttcatttttattttttgtgttgatcaatatgtaagatactatgtatttcttgtattcattgtatttatttgttctttcttaatagaaagtaaacttcccaaaaacaaggattttcatctgttttgtcactgctttgtctctgctgtctagaacagtgggacatattttaggtgctcagtaaattttcaattggatgaataaatacaataatctcagaagatgtaaaaactgcattccataaaattcaaaatccattcatggtacaaaatcagtgaactatgattaaaaggtaaaaacattgagcaaacatgatatttattggtgaaacattgaaagtattcttttttaagattacaaacaagttaatacatctttaatcagcaagataacatttctatgcagcattattatataggaaattctagctaaaacaatacaataagaaaaagaagaattattagtattgaagaggaagaaacaatgctatccctagtcttagaggatattttgtctgcatagtaaccatcccaaaaaaatacagattaagtattagaatgaataaaagaggttatcaaatatgccacaaacaaaatcaatgtacaaaatcaattgcatttctgtactttgctacaaatatttggaaaaggtaacaaaataccatttatagtagtatacaaaatataaagtacctaggaaaaactcttagaaaaacaggaaaagacctgtgtggagaaaatgataaaacaaagatccttgagaaaacctaaatgagtggtaaaataaatcatagttctgagtagaaaaataccaatctacaaaagatatgattctcctaaaattgtttatttttattttttatttttttattattatactttaagttttagggtacatgtgcacaatgtgcaggttagttacatatgtatacatgtgccatgctggtgcgctgcacccactaactcgtcatctagcattaggtatatctcccaatgctatccctctcccctccccccaccccacaacagtccccagagtgtgatgttccccttcctgtgtccatgtgttctcattgttcaattcccacctatgagtgagattatgcagtgtttggttttctgttcttgcgatagtttactgagaatgatgacttccaatttcatccatgtccctacaaaggacatgaactcatcatttttatggctgcatagtattccatggtgtatatgtgccacattttcttaatccagtctatcattgttggacatttgggttggttccaagtctttgctattgtgaatagtgccacaacaaacatacgtgtgcatgtgtctttatagcagcatgatttatagtcctttgggtatatacccagtaatgggatggctgggtcaaatggtatttctagttctagatccctgaggaatcgccacactgacttccacaatggttgaactactttacagtcccaccaacagtgtaaaagtgttcctatttctccacatcctaaaattgttttagaaattttatggaataaaaatataaaaattcctgcacctttttactcaccatggaccatgcaagctcattcctgcccgcacacagaacagcgaacagggagttttgccctcccagatattaaaactgtgtactactataaaaatagcaattaacacagtatagtattgagtagaaaaagaaaataatagatgatttcagacagactagaggacccaggaagagacccacacatttatgtaaaattctttataaagacttgactcttaagacaggtaaatgcaataaatgctacatgacaattggttaactaagtggagaaaaaaaatggatactacctcacatcacacataaaaaaatcaattctggttgcaagacaaatctaggaaattgttagaaaaatatatataagaagatagctttatgacctcagataatgaagaattttaaaaacaagatacaaaaagcatgaaccatatgggaaaagatttagttttactacattactaccctatttatccttgttaaaatgttcagtagctccaaatacaatggaaaaaagactgggaccagtgtctcacaaaagagaaaacacaaatggctaaaactaatatgagaagatacacaacctcattagcaatcaaagaagcttacatttaaatgacaatgacatatcatgttccagccagtatattggagaagctaaaatgagtaatagcaagagctgcagaggtatgggagaaacagaacattgttagaaaggaagtaggttgttagaactaatttgcaaagtactttgactttatcttgacaagtttaagataccttaaatcccatcaattccattccaatgtatagactctggagagcttttatatttatatatgtttatatttattatatattatatataattatatgcattatatatattcacacacacacacaggagatgaccataatattcacagaatacttgcttggaaaattttagtagactacttttagagcaggtttaggatcacagcaatatagagcagaaaatagagttcccatatagccttcatccccacaaaagggcaaccttttcactatcgacatcccaaaacacaattgtgtatttgctgcaattaatgaacctatgctgctgcatcagtattacccaaagtccatagtttacattagggtctgctcttagtgctgtgcattctgtgagttttgacaaacctttaatgacatgtatctgtcattgtagattcctatagaagagtttcacttccctaaagagcctatgtgctctgcctattcatccctctcttcccactaaaacctggcaaccactaatcttttcaatgacttcatagttttgccttttccagaatgtcatatagtggcaatcatacagtaggtaaacttgtcatattggcttctttcgcttagtaatatgcaattaaggttcccaccagcactgaattcccatcagcaatgaatgagagtttctgttgctccacatcctcgccattatgtggtgttgtcaccgtttggattttcaccattccaatctgtagaatcattgttattaattggggggagagacaaccaacaaataaaggaaataactcagaggttcgttagcagaatgattttaaaaattgagggctgtgcatataataaagtgacataaaactatatacacacattgtactaaagtcgatttgctgttttgatattgtactgtaattaggtaagatgcaagcactggggaaactgggtggagggcacatgaagcttctccatactatttctccaactttccgtgtgcctataattttttttcaaaccaaaatgttaaaaaaaattcgagtgttgttttctcatagataaaatactgtccagctatggaagcaatgaaccacagataaaaaccacagggctacatctcacaaacgttatatggaataaaaaaatgcagtcgaataaaaacagatgcagtataatgctcaaaacatacaagctaaatgatatattactttgggatacaactgtgataaaactcaagaaaaacaagtgaatgataagaaacagaattggtgataatgcttatctcaggggaacccccacgcttttgtgagttttacatgcaggagactatcaggtcctcatagtgaatatcggagaataattcagggggattggaaaaggaacattttgaaatataccagagcattctgtgtattcttattaactaacccgccctcgggagaaacgatcttcctagagtctaacctgctgaggttttattagagcctaacatacctgggctaagagaaaggaaggaggtttcatacaaaatgaagcgttctcttaccacatgatccagaaatcacactccttagtatttctccaaatgagttgaaatgtccacacaaaacatgcacatggatgtttatagcagttttatttatgattgtcaaaacttggatgcaaccaagatgttcattagtaggtgcatagagaaaaaaattgtggtacacctagacaatggaatactattcagtgctatcagtgctaagaagaaatgagccatcacgtcatgaaaagacacaaaagaatcttaagtgcatatcattaagcgaaagaagccaatctgcaaaggttacctaccgtatgattgcgattatgtgatattctggaaaaggcaaaactatggagtcgttaaatagattagtggtttagtggggagggaagcgtgagtaggcagagcatgtaggatcttcagggcggtgaaactattttttatgattctgaaatgatggatgcatgtcattatacatttgtcaacacctataaaatgtacagccctgagagtgaatcctaatatgagctatggactttgggtgataataatgcttcagtgtaggttcatttattgcaacaaaggtaccactgtgctgggggatgaccatcgtgagggaagctgtgcatgtgggtggggcaggggctatatgggaactctcactactttctgttctatgttgctgtgaacctgaaactgctctaaagtataaagtttaaaaatttaaaaaactctgatctttagtttagcattttacaatctattttattgaaaggaacaaataaaagttaggattaagagaattaaacatttttcatagagcatataaatatagagcatgtaagagaagacttgattctcatttcagttctgatctgtctttaactttggcttagctggttttagctgatggtttttgaaggatggtccccagaccagcagcatcaataccaactggatatttgttagaaatgtaaattctcagacctcaccccagacctattgaatcagaaactctgggagagggactgctatggcttgaatgtttgtgttccctacaaaattcatgttgaagcttgatctccaatgtaacagtattaagaggtggggcatttaggaggcaatgattaggtagtgaggtctctgacctcatgaatgggactagcaccttatgaaaaggctggaaggaactacgttggcctctttggcccatcaatctcttctgccatgtgaaaacatagcatcaaggtgccatcttggaaacagcactcgtcagacattaattctgctgggaccttgatcttggacctcgcagcttccagaactgcgagaaatacatttctgttgttattattacaaagtgtcaggtattttgttatgcagaaggaacagactaatacagggactcagcagtttattttagcacaaggcttccaggtgattctgatgtgcatagacttttgagaaccactattactttcaaccttttcatctataaaattataaataacactagatcactttttttcaacgtgtgatgtatatattactgatcatgtgcaggacagttttaggtggcataaataagagcattttaagttttaccagctctgtatttattttaaagtttgttagaaaaatataaatagcataccaaatctacaagttcactggtgtttttgcctcatatatggctaagttaaaaaaaaaagaaaacaaaaagagaatcaatggaatcaatttgaacttgatataaatagaaatagccaaaatagtaaggtgataggagaatatcacaaggtgcatggagtaatttctcaaattttgaggccttagtaaccctgcactggattaatctcctacgtattttcattctaaaactatgagatttcatatgctcgtttttcttacagatttgcctccttaattttctttttaaaattcaagctcacatattaaaaatgtagtcgatgctgtttgagcttggaggggaaatggcctattagtgtgcttttgtactgggggatacttatctgagattcatatttaaccatggttaatggacatggggataattcacatgcaaatcatcaaagttaaatatattaagaagaaatctgtcctgaaaacaccatttaattttagaagcattttcttcttttcactacttgaagtatttatagtggaataggcagatgtttttataaaaaggaaatgaaacgacatttggggacagtaataaacatattttggttaattagggatttatactttgtaaaagttttcacattataaatagctaaaacatagctggcctttttaagtggcagtttaaacagctttattgagatataatttacattgtcatagagtccatctacataaagtgtacaatttagtggttttgtgtattcacagagctatgcaaccatgatcatgagcaattttaggacatgttcattatcccaaaaagaaaccccatgttcattatcagttactccccatcccccatgtagttccaaccctaggcaactacttacgtactttttatttctatggtttttctcattctggagattacatagaaatggaatcatatatgaagtggccttttgtgactggcttctttgacttagcatgttttcaagattcatccatgttgtagtgtgtgtgtgtcagtattttattcttgaataatattccatggtattgatatatcatgttggtctatccattcttcagttaatgaacatttgggttgcttttactttttgctatataaataatggtactatgaacattcatatacaagtttttgtgtgaacatatgtttttatttctcttaggtgtatacctaggagtggaattgctgggtaacaatacttaatacttgatggtaactatatttaataattcaagaaattggatataaagcactcttattcaaagtaaaattgcgattttatttaaaactaactacatttctgttttaataaggtatgaattttgtttgtcaaggattttacataaaatctgtctccaaaatggtgtttggcaaaaatcattattaaaatacatgtttttgaacacagcagcttacagactgctattctacatcacagtttatcatcatttatcaaaattgtcatgtcctctgtgacatgtttctttttctgaatattttattgtcacatgtgtcattaagcatttagaaaaaaaatggcctggaatcttcttcctgaactgatgaaattcatgatttttgtgtatagacatttacaaataaattatatgttgttaagaaactaatggtagttttttttcttttaaaattctcacttcaacatcaataaaaaatgtttctgaaatggaaacataccattttgatgtctaactgcatctgacacttttaagttttgctgtcctattattaatattttaaagttttaggaagggctactttttatataatgagattttatattccataaattattatttgactttgttttactttgtcacaatgcttcttcaaagcttttttgccaaattggctacctttagattcctttttaggaaaggtcttcaggatggtcttttttgttgtttttgtttttgtttttgttttttgagacggagtttctctctgtggcccaggctgaagtgtagtggtgcaatttctgctcactgcaacctccgcttccttggttcaacgatttctctgtctcagccttctgagtagctgggattataggcgcccaccactacacctggctatttttttgtatttttagtagagatagggcttcaccatgttggccagactggtctctaactcctgacctcaaaggatctgccagcctcggcctcccaaagtgctgggattacaggtgtgagcctctgtgcccggcccaggatgctcccttttaatagctacttaggaaattaggttttggtaccttgttgttagaagagaatattcctgaaaaaaggaaacaactaaatgcatcgactatctggggtagtagaaagagaagcgacagcacagagaaaagatgccccttagggaggagaaagaaacaaatatcaattagacttgaacgaactaggtttctttattgatgaagaaagttaagccacactttaactttccttgccacactaaaagcaaacaaacaaaccccaaagaatagtcaagcagctgagacattcagtagccttgtaggcaaaacaagacatattcttattgttggagtatagttgtgtaaggcctgtagcccctttcttttgactaatttattccttttggaatgaaaatatttactcaatgcctgtacctgatctgcagactgatcagctgaaatcatccttgattttatttctgatagggagaacctgtcctgcacttaccatggtagagtagtgggtgtttataatgaagatgtaaaactttatagtttggatcatgtgggaggtagactctgatacagggcttagagtgtttattagggagtgctgttggaaacaacacaatggaagagaaaagaatcaggatcagacagatggaagagtcaaggtgtttctttggccaacaacatggaagctttagaactgaaatggttaatcagtttagtgccatgtttggccaaagtggccaggtctttgtaaaccacctccattagtaaatggatgcggctgtcacctcccacccaccagagcatgaccttaggtcaggcgttctctgcagctcagactgttccagcccctaaaggggcttacagctgggattgtcctctgacaacactccctacatctgggccaagaagttcttccttgaggattggtcttgatggtgtttctcctatgtctgctgcactacatcagtcattgtccccttaaccttcacaaaagcttttgaaaatatttatattttttgtttataaaagtggtacaattagacaccaatctgtattcaacagggcaatggttaaatccatgactttggagactatgtgtgctcttgtttgaatgtttctatctcccccagatttatatgttgaaacctgatctccaaagtgatggtattaagaggtaggacctttggaagatgattattagatcatgagggtaaggctctcatgattggattagtgcccttatataaaagggccaacggagcttgtttgtcccttccaggacatgcgaaacgcagtgagaaggaaccatctgtgaggaagtgggccctcactcaatctgctggtaccttgatcttggacctctcagtctccagagccatgagaattgaatttctgctgtttgtaagctacccgtcaacgatattgtcctagatccgcccaaatggacaaagacaatttagaattaacataatgaggaaatctgtgtgtactgatgagaaaatatgtccatcatgtcatagactaaaaaaaccagtttgccgactatacacatatatacactatgattatatttttatttacaaaagctatacaagtatgtaaaatacacaggtacgtgtagattcactaaagcttttaccttctgaagactgggttgggggtaaacaagaagagagaatgatagttttcaatttttgttttgtatgctcagtttatatgttcatttttctgttgctgatgtaacaaattatcacacatttggcttaaagcaacacaaattgtttatctcacagttctggaggtcaaaagtcaaaagtctgtcttactgggctaaaatcaaggtgtcaggagggctgtcttcccttctggaggttcaggggacaatctgttttcctgccttttccagattctagaggctgccttcattccttgacttgtgacttcttcctccatcttaaaagccagcagactcacatcttcaaatctctatctaactctctcttccgcctccatcttccacttcaagaatccttgtaatttcatggggcccacccagataatccaggataatttccttgttttaaggtcacatgattaacaatctaaattccatatgcacctttcttaccacttgccatgtaacataacacattcataggttctagggctttggatgtgaccatgtttggtggggtgttattctgagtactacactaggtaagtgaaactacagctttctcacaacctatgtgctagctgttcatgcttcctgttcagataataccaggtaaatgagagaagagaaacatccgtgggtaaacaattataatttagtacattattattctttaatttctatagtatttataataaagttcaataagaatttatctatgaggaagtggcttttctaaacaagtgtaaagcccccttgtttggaaaaatgtcagagagactgcatactttttcttcttgcccgcttttcccatgctggcctctgttgcagctcttctgaaatgtaatcattgctttatttctttatttatctctttcctaattttcttggaggttctttaagatgggggctatatactttaacttaccaacctattcaatgaatattcattaagtacctattatggctaactatttttctgaacatttgggatatataaattgataaaaaccaataaaaatttcacttctttaatggaggaaagacatcctatatagagggtgatgaatggaaataaactagaacaggtcaagaagaatcacaagtgccaggtttagggattgtttgtaactttaaataggttattagaataggccccattaggatggtgatatttgagtaaaggctttgatgtggtttgggtgtgtccccatccaaatctcatcttgaattgtagttcccataatccccacgtgtcgtgggagggaccctgtgggaggtaattgaatcatgggggttttacctccatgcttttctcttgataatgagtgagttcttgagatctgatagttttctaaggggcttttcctccttttactccacacttctccttcctgctgccatgtgaataatgatgtgtttgcttccccttccaccataattgtaagtttcctgaagcctccctagccatgctgaactgtgagtcatttataaatttcctctataaattacccagtcttgggtatttcttcatagcagcatgagaatggactaatacaggcttggaggagtttaaggagttagtcatggggtgtcagagtacgcttcattaggaagatgctatttgagtaaagactttgaggacttcaaggagttagtcatgtgggcaactacacaactgcattggaggcagagggaacatttactctaaagtccttaaggcaggaaaattccaagactgatcaagtaacagcaggagagcgtgtgcagacgccttgggccaagatgttgaatacatactgaagggagccaagggtgggaggtgatccgagagagtgatttttctggtgtggatcagggtggtagcaatgaacgcgatgtaaactcatcagattgtggatgcgctatacttggaagatagggcaagtaaggtttgtggacaggttggttgtgggatatgacagaaagaggttccaaggatgatttcaaggcttatagtttctctaattggaaggaggaagttgccatcaactgaaataaggaaggctatgatgagcaggtttggtagagaagatcaagagtttgtgttgggcctgttataaagttgagattctataagacttccaagggtagatggtgagaagacaatctccagatatatgaatctggagtttaggaaagaggtctggaatatgtgtaaatatgggagccatcagcacataatagatgctgagtgaacgaagagactgcctgagattatcaaatgaggcatagatggcttgagaatgagactgaggttggagtcctgggtcactctagcagagattagggtaagaagggaaaccaaccaaagagagtaagctggagccctctgcaccctttttgacagcagtaggtagtagatgtttatttagtggataaatgcccaaagaggaggtaaagtagcaaatgacaaaggggaattttatctgtctatgtagaataaattaaaaggtgaaaaacagaatcaactgtatttatctcatcagtgaatgggtaggaagcaagtgatggaaattaacataaaagtagatctgaggccgggcgcggtggctcacgcctgtaatcccagcactttgggaggctgaggcgggcggatctcgaggtcaggagttcgagaccacggtgaaaccccgtctctactaaaaatacaaaaaattagctgggcgcagtggcgggcaactgtagtcccagctactcgggaggctgaggcgggagaacggcatgaacccgggaggcggagcttgcagtgagccgagattgtgccactgcactccagcctgggtgacagagtgagactctgtctcaaaaaaaaaaaaaaaaaaaaaaaaaaagatctgttcctttttactctataaatatatttgtttataaaaataaccgttaattttaataagttaaagtgtttttttcttatgcaattacttctttttaatcttcatgatgcttaatgtgctggtgtggctaattctttgaaaaagtatgtaaaaaaatcccttctctacagagatgaatctagttcttcagattggttattcctatactttttatttgtttttgtttttgtttcagagacagggtcttgctctgttgccctggctggggtgtaatcacagctcactgcagtctcgacctcctgggctcaaggaatcctcctgcctcagtctcctgaatagctgggactacaggggcacactaccacactcagctaatttatttattttttgaagagatgaggtcttgctatgttgcccaggctggtctcgaacttctgggctcaagcaatccccctgcttaggcatcccaaattgttgggattacaggtgtgagccacccatgcttgaccatgtgaatatgaatatactggagaatagcaacactaagtagttgaaactcattttagaaattaccccatgaacatatctaaattcttcataatgagtcatagaagaatttctaaagtcaacttggtaaaatgtactgatgattttcattgaaaaagcatgattttgctttcatatatttaataatttgtagaactttcaactttcactgtggtcttaactggtattaaaggtgatttggaaattgtattgagcatgtatcttgctatagtataaaagaagtagacattttccttaagaactttatattctaggttaaacagttaaaacacttatataaatatacatataaacagtttagttgagaaaatataagatgatgtaattgcaggtctgtttgactcccacctatctcttttgagagaagaatttataaaagaatagactgaaaaagtggcaataactataaacttgcattttgacaggaagaagaatagaaaaggaagcagaatcagctgccttgatatggatacaagttctacaaataggacagccactatgcttgaatagtagtagttcacatacttcacgaagtaaattaaatgtgattatattgggcctgacctgttggtgagaagtggatgtctcagcgtggggaggtgtgtaagcttgctcaggaccaaaaagagccctaggtagtgaaatctttgtgaggggttggaacctgaataggaaatagcatttaacaatgctcatcttaaaaccgaaaacctcagtttttttatgagtatgttaagaatctctgaagatacaacctgggttggacgattacccaagatctgttacatatttaacatcagggaagttatgcaaagcttattattgtttcttgtgtttattttgggtgctgaccttcagaaaggccttagctaatctccaggtcaaagcctatagtgaccacccttgctgccgctgcatgccacacctccctctctgtgctatcttgctgcatttagggactttgttgtcatagttcctctcttactgcaaagggattccaaagctcttgaaaaataggaagtagctcatccttttctatgggctgaggggagcagtccttgatttacgataagaaaattctataatctttggacctttgatagaggtgacaaatacagagatctttcttggaatataatttgtccaaaactattttgagaaagcacacaaggcattaacatttacatttccaattaaagcatagggaaactgtttacaacaaggggacagaagttgatgctgttgtttattgtgttatatgctggttatagaccctcgttttacagttatttctctaaaatgcagtaaaaaaaaaaaagaatgcctagcaacatagcaacctctatgaaatgaggcatatgctgtttctaagactcacaatatgtttttctgaactgtttgctcataaacatgtttattgtaggtgctgcttgggcagggacggctttcctgtagaaatcctctcttgaatacactaggttctggttcctcttgtggaagaatgaagctctttttgactgccttggaaaatttgatactttcaggtatttatgacataatcaatggctgatatgtgtcttcaggatttatgactgtcctgtcataaattgccgtagtttcagagtgcatacaacatcactgtctttttattactgttattattggagacaggctgtcactgtgttgcccaggctggagggcagtggcgaggtcttggcttattgtaacctcctccttgccagctcaagccatcctcccaccttagactctcgagtaggtgggactataggagtgtgccaccatgccttgctaattttttaaaaaacatttttgtagaaatgaggttttaccatgttgcccaggctggtctcgaactcctgagctcaagggacccacccacctcagcctcctaaagtactgggattacaggtgtaaaccattgtgcccagcccactctgtcttttgaggtggtgggaaggtgagatgtagtgacacagatattctgtgtaccatagtgataccttatttatgaatcatcttgctctctctcttgaagtctctctatgctagaaacatcatctgatgtggtattcgacacgggttcaccttctggttttgtcactaaatgctttatgactttgatctcagcccttctctgtgtctagagaattgttaaattactaaattaaaatgaatttttgagagtcttttgatgtcacaaaatgtaatagctgctgagtgcccaagtatatatcaatttttctttagtgaagaagatgcagaagtggtaaaggagaggctgcttttggagagggcagagtgagaggagatggaagtttggaaatatgtcttataaggaaggccaatgaggaggcaatcattctgtaacatgtacttgtgatctagtaaagcttgtgttttgtatagaaggctatgtaggcttttatgactgggaacgtgtgaaaataatgacctagagccaatggggcatagggacatttgcggcatctaacccaggtctttttcattcccaggctagggggctacaattctcttctgaaagttacttggcatgatcatcttgctgttcttaaagcaaaatagcccaaattttgttgaagaaatgttttagagaaatgattgcctcatatttctaacaccactcttggttatttgtttactaaatagctttttattgggggaaaagtgtatggaaatttaagttggggaaattacttgggagaacttcttaatgtattagtctgttcttgcactgctataaagaattacttgaaactgagtaatttacgaagcaaagaggtttaattgactcacagttctgcaggctgtacaggaagcatggttggggagccctcaggaaacttacaagcatggcagaaggatgaagaggaagcaagcaccttcttcacattggcagagcaggaggaagagagtaaaaggagaagtgctacacacttttatttatttatttttttgaggcagagtctcactctgtcacccaggctggagtgcagtggtgcgattttggctcgctgcaccctctgcctctcaggttcaagtgattcttatgcctcagcctcccgagtaggtgggattagaggcatgcaccaccacgctaggctactgtttatatttttagtaaatacggggttttgccctgttggcgaggctgatctcaaactcctggccttaagtgatctgcctgcagtggcctcccaaagtgctgggattgcaagcgtgagccaccatgctcggcctacacacttttaaatcttttaaataaccagatctcatgagaactcactcactatcacaagaacaacaagggggaaatccacttccatgacccaatcacttcccaccagatccctgtcccaacattggggattacaattcaacatgagatttgggtagggacacagagccaaaccatattactgaggaacaacttaatgtagatagtttctgtgtatgtgtgagaataaagttttcttataaaccattctattttttaagttcaactattttatcttccttaaagataggggggttgaaagttgattttatagtttgagctcttgttatttttcaaccattagccaataaatataagtggcaattatttaagaagaataacataataatcaaatatgagaaatataagaagcttagaattgtggagttggaagggacaagtcacctcaatttatagtcagcatttatctaattgttctgccccccttaactgtaaaatggcaaaagtaatacttgatccataaatttcttttaaggattaaaagataatggattaaaagataatgtatacattcaaaaatattttttaagtgttttgtttgtttggtttgttttttcaagacaaagtcttactctgtcgcccaggctggagtgcagtggtgctatcttggctcactgcaacctccgcctcactggttcaagcattctcctccctcagcctcccaagtagctgggattacaggcatgtgccatcatgtccagctaatttttgcatttttaatagagacagggtttcaccatgttggccaggctggtctcgaactcctgacgtcaagtgatctgcctgccttggtctcccaaagtgctgggattacaggcgtgagccacagcacttggtctattgagtgtttagtatgtgccaaggcatatgctggttcagaggatatatctgtgtactagaaagaagatcctggctttactaactaggagggaaaaaaactttacccggtgatgacaaaggtgataagtacttccacagtgctcactgggacaaagtgtcagaccttacacagtacctgatactaggggagaaagagggatggacctgatgtgtcttgggtgtaaagtatacccattatataatcctaacagcaattctgtaaacctggtcttattttccttccttttacagatgagcaaacttgtgttcttgtaggtctgtgtcaagtaatgtttgttaaataagttaatgtgtaaatggaaacctgagcagttgtgcaacatgcccaaattcttcagcaagttagtgacagctgggaccagagctgtttctgacttcagcccaggggtcctttcattattctacactgcctctcagagtgtgcataggtgtgtgtgtgtatgcatgggagataggaaagttgcagtcttatatatgctacacttatcaatataaaaattatttcacaaaacacaaataatagtgaagtcagggctcctagtttaatccattttaattcctatcactagttacaggtatatttaattatccagatacgttgactttgtgctgtggatttagtgtactaaataacaggatccaaatctgtgaagttttctttttctggaaaactactggctctgaagcaatttaagccagaattcaaggccattcatccaaaatttaaggtgttctgaaatagaaggtgtatatatcactttacttaatgtgtgggttgtgtgggagacttttctttgcaaattgaatcattggagaccaatgatcctataactgcatttgaaatccttcagctggcaaacctttggtagttttaatttctttctcaaagaaaacatctgttataggtgtctgtagtctagttgtgtgtgggctaccatttcaattagtaaagctataatgacagtcttgggattttgtagaaaccctagtaatagatagaagtgaacatttctaatcctttattatgatcccgttatcaatttcaagtcagtttcttccctatgccatctatccaccaactcccagctgtcttgaaagaacatatataatatttttctaactttagggaatttcttttaagtttgagggcctctttctttttgctaggaagggaagccgggtcaggaaagcagaggagttagttttggagggccctccttttgtgcatcatttagttgcagacctaagcaatgtctttaatcccaaggaaatgatacaacactcctggagtcttccacggttttcagaaggtgagtattcactaacagtacctaactctgtcccttctgtaatttatgtggactctaaacattgctgtaaagtactgctggagaaatacaagacttgtacatttttcttttcttttcttctttccttccttccttccttctctttctctctttctttcttttttttttttgatggagtttcactctttgttgcccaggctggagtacagtggcacttaaaagtcaacctgaatcgcatttttctccagtctgcaatagtttgcccaaataattacagttttaagtcttttaaatggttactagtccttccagcacagaaaggtgatgcagccccaaataatgtgtatgtcggtactgtcactacagtgctttgggtcgaccaatctcatcctgacttctgatctggagtctactgtcatagaaaggtataatatgcttataatttttctcccccaatatttctttgcttctctgtggcagtatttctcccccaaaacacttagagatgtttgattttatccttgcagctgttataaggcagacaagctcgagctgacacacacagtttctctcatgacaaggaccaattgtgatttatgaccatttacaggatgctagtgatgtggggaagggtgtgtttttagctagcaaggctatgtcctttcacttggaaataaacaacatgttaaaaatatgtagcagggttaaaaagaggaagcttcactgtaattttcgtttagtgaagagcccttaggctaactttctataatgttcagctaatgtgtttatatcttcaaatcatcttaacaaatatttattgactgcctgcttcttgcaaggtgttatgctggctgaaatgaaagttttcatgaaaattctaatgtatagaattaggaagttagaaagcggggttattagcatgggtctttgtctgctttagttgaatagaacctgttatgaagcaatacattttcctccaaaaatttggcttctttagcaagcagcatatcaactaaagatgaaagaaagaagtggaaacatttattcacttgtaatgttaatataaatctttgttttcatcagaaattcctgaaaagctagattataatatgttacagtacaaccttgggtttggcttttagcaccaaggttaaacaaagatttatgaacacaaaagatgctgtgaaagctcagattcctgctaaaccttgaatgtcctatagtcctctaaatggtcctaaatgtggaaaaatcagtcttctcattggttaggacccactgacttccgtcattgtaattactgtgatataacctgtagggtatgagtgattaaataatttaatatcactgggagagttacttattatgtgttttatttgtatatttgcaagcagttcttcatttctcatgacagttcttgcattcatcatttactaaaatggggttctgagttaataacatttttttcctcattataaaaattctcagaacaagtcaagatctaattagacatcttcaatttattaaatcagacctctttacagagcccttttagaagcccaggtaacacttgttgttttaaatcactggcccaacatagtcacatgaatataccttgatgcaaagaagacggtgaagatgtaattttttagcctttgcatattaaaaaaaatcagaattctgatagtaagaaaaacatattgtttagttgcccaagttgtgtctttttctccacctctgatttcttcccaatactttgatgaagtactctgatgaagtactcccaatactctggcgattttctttttcttacccactataaagtgtggtgtttgcacttcatgcctgagtctttctttctgagaagaggctcctgcaagtctttggcagctttcaactacattaattttacaggtccatccttgaagcaaaactttaaaaaggtattttatgcttttttccttcctttttttaaaaaaaaaatttttcaccttttaattgtcagttctaattatctgtgcaaactgattcaggcagaaacatacaattctgagagaaaaagggaccctgggactgacaacctaggtttactgagtgggagaggcagaggtgcttcccaaataaaaactgtggctgttaccagaagaagggaacagggatgctggaaaaagaaaggacagacatccagttctggaaggtttatttggcttttattcataaaaatacgaaaacctttccttggttttctgctcttaatcttcctttaaatacatcaactagacatagtcgatataggtggttcttgtaagataaaacctccttggccccatgcaggtactctcctgatatttatacacagaattgcccatgtctcttaaaaaagagaacatctgatttgcctttaagaaaaatgtgcaggatggggtgggaatgagggtgggtgagggctttacatttcatgcagttgcagactttttggaggcagcttttactctctgggtcatattttaattcctgatcctgaagtggaggggaatcctgatgttagtgtctgggtggtattcttgatagacttttagttgaataagtaaggaaggatgcttacatgaacaaaccttattcagtgtcccagtttctgagcagcccaaggcaccaaagcctaacctaggatgaggatggtttgtgtggagctggtgaaactacagctcccgatctcatccaagattgttgttttccatttgctgctgaacagctgtttgtttggctttccagcggcatgaatatgcccacataatcacaaactcctagatattgaggcatcttaatgagaacatagcctgattttggaaggaatggaatgaaggaggccaagtgaattgcatcagggtgcctggtagaaaaactggcattagaacctcgattctatgctcactgtccgtgctctgctccagtacatgaaatttgtcagagaaaatgagatgaagcaccatggtttcctatgccctccctgtttgttcctggtacttaaccaacctaaaatctactcatggatctgtcaggttttagatttagtaacaggctcattgactatggaaataattgggtgggggctgaggtctttatggtagattcaagtaactagagcaagagtagatgggttattgtggtagaatgagggacatttgctagtttaaatcacatttctgcagtttgtggttggacttggagcttctttttctctgtagcttagtagcagatgcgcttttcgctgctggagcaaaactacctacagtagtgtgaatcagcaagtagggagtattattagtcatgtgaattcagatacttcctattgccaaaggcttgatatattcatatcttacattttatcttctctgtgacgattcattacatgtagtgagagcatatacttagtcttctgtgtggctcaactgggggcacatttggtctagtccaagtaattatatgtaacgtaaaattacatacagcacagtcatcaaagaagctgtccttccttcccctatcactaagatctagggtgactctggagtgccactgtgtgaacatttctcactcttgtgagcatgtttctaaatcccaaatcaatctgacaaaggattttctgtgaatttcttgttaatttcttgacataaaagctcttatgaacatacatattccgaacttaattctttgtttgagtcaaaatcatttttattcaagagggaacaattatattaatctagatttgcctggtaaatccataacatacagacctgaagttcaagcagaacccgaggtaatgtgagccctgggtaaggtatagtaaggatggagaggtaggtaaagaaaggcgagaatgattcatttattgagaaagatgagcaaggtggtcaaatagatttgcttctcaacaaagcgtgtagtttaagcacttagttttggtttcttttgaagctgccttccctttttcccatctctctattccaacataacagaaaaagaaggaaaaaaaatcaatacaaaacaaccatttacttatttcccagagtaatgcttctcaaactttagcaatgtgcatgcaaatcacctggcaatcttgtaaagtgcagattctgattcagtagtggtcaggcagtgattctcaaagagtgttccttggagcagccttgttggaacaactgtgagcttattagaactgtaaatttatgagccccacctaacctattgagttacaattttattagatgggcccaaaaagtgttttaggaagcttaccaggtgattcttattcacctgaaagtttgagaatcactgacatagaggagattctctggagtttttctcaggactctggtattttctactgtcactgggcttacagtatacagttgatctttagcagtggaaacagttggacagagatctttatttaggctcctgaatggctgtcggcatcttgaaagttgactggcttcattaaagtctctatttcttggtcctttgacatctattatgataaccctgatactttctaaagcagacatgccacttcatggaatcacgcacctcatggaattccatgcacttcatggattcatgcacgttagcacagctagacacctttatgtggcaattgggtaatacttactttaaaagatagaataaaggaaaaactacctaaaatttcccataacatttttttttttttgcagacttttcaggggtatggatactatatgggctttatatcttcatatcagcttagtcctagttaattgttattttcaatcatattaatggccattggtcattgctagccagtatctatgactggctggttctaatggctacaagcatgcttagcagtgccctcatgaatgttgctattattgttgaaggaggaaaacattttaataattggaattggattttctcagtattcagtattgcaaaaggtggatgtaacttcttatgatgtctcaacagctattactttattttttaatttatttttaaaaatcttattgtcacaccccatgattctgcaacagctataattttaatttctgaaagttttgatgatttcctccaaggctatagctggagaaatgtacattgtctattattagtaacatttctcaaattgtttacaaggcctgcagtatagatgggctgagactgtgtttatgctttttcattgagaaattttggtcttgcagaaggaatccatttgttctgtgaatctctataaagcaaagagaagagttcaaaatttataagggagcccaacaagtgttccaaaaaaggctatttaggcacaacatttaggtgcttatctagtatgttgtttctatcaatacatagcttaaatataaatagatctaagaaccttagttaagacgaaagggtatagcataccatgctataaaatctgtcatacagaatacacataaagtgtctgctgtaattttgtaatctttccaaaagcaatatactgtgtctacagccctcatttacaacttatagaaatttactcattttatgcagaaaattggaaaggagcagatgtttattcctaagctagaattttgaaggccaacaattaaaataaacatgtctctgccaaaacttgaactaaattgaaaaatttagcatataaattaaagctcacttaaaactaaatttatcaaggaaatacatttgttttgcattgctggtttcaattattctgaaaggacttttatttttatggaacactgaagatttttaaaagtttcaaacaatttattggacaattgcaccatttaaaatgagttacaaatgtcttgcttaaatgtatgagctattagcacatagttgatgaccttatagagagacattaaagcaaccatatcctcaagtttatgtctatattcccaggggagtacaagaaactggtctgtagacctgaaatagataaagctgtgggcagcattctcttctattcatttgttcctttggtcaggaatctgaattttgagacatattcaataaattatgcatactcaaatatttgtgctcttagcttattgccacagaggaaaagagattatttcctactttttagtatctctctgcttttgtctgatttgtacaatgttgcctaattaatttttcttaaacactttgccctccacacattttgcctaaaaccttcattggctcttgtaagatgtgctagcattctagggtctcagtttactgttgctaccctacttaaatgaatctccaatgcttcctaattgttacttcttggcttcaaccaatccaatgagtttcctttctctgacacatatcagatttatgcaaagtagtttcttggcttaagttgccctatatttctacaaaggtctagtcagatggtcagatgtgactatctctacatatgggtctgaaatctagtttaggaattctatgctgtgaatgttttagcttaaaactctaaaatttaactagttttttgaattctctctattatattacatgcttctggaataaatataaacacaatgaaatcctttcttgaaaatttaggaagatgttatacacaatataaataagttgtaagatagtgatttctactagacagttaaggtattaaggactatttgtccttgtattaaatggacccaggctatgcctttctagtgtttttgtatactctgattttttagtggctttccattaaatcctgaaagctcactactaagactcatgacattttttggggggttagaaaaattactatgattcagggctgggcgcggtggctcatgcctgtaatcccagcactttgggaggctgaggcaggcggatcatgaggtcaggagatcgagaccatcctggctaacacggtgaaaacccgtctctactaaaaatacaaaaaattagccaggcgtggtggcgggcgcctgtagtcccagctactcgggaggctgaggcaggagaatggcgtgaacctgggaggtggagcttgcagtgagccgagatagtgccactgcactccagcctgggcgacagagtgagactccgtctaaaaaaaaaaaaaaaaaaagaaattacttactatgattctctctctcaaataaaattctggtgacttttctttaactcaccaaaagtagatacatacatatttctaattcattgtttgaagaaaagccttaagatattttgaaataaaattctacacacattacacagaacttgtagctacatgaggagagcaaggtttttttgttttgttttgttttgtttttgagacggagtctctgtctgttgccaggctggagtgcagtggcgcgatctcggctgactgcaacctctgccccgccgggttcaagcgattctcctgcctcagccttccgagtagctggaagtacagtcgtgcgccaccacacgcagctagttttttatttttatttttatttttagtagagttggggtttcaccatgttggccaggatggtctccatctcctgaccttgtgatccacctgctttggcctcccaaagtgctgggattacaggcgtgagccaccgcgccccagcctgtttttgtttttattttgtaaaacggccttctccacgctgaaactctctctcttttgctctttcatctgtcatctcctccccactcccacaccccacactcctttacccaatcttgccactgcaggacaagagataggatgaaagttggaaaataataatttatggagaaagcctgtgttccttgctttatgaaagtaaattgtagataattaatgttgtgacaagatgattctattttgatgaataaaatcattgaaaagctatcaagccccactgtttctctgctgagagaactttttttcctctctgttctgcattcctattcttggctttcttcccaattagtctctgctaaagagtgataattggggagataggattttcacctaccttgtgaacagtaaaaatacccatttttccaccactgaagctatgtgtattaatattctatgctttcagaaagaaaatcccacactactgtgattcctgcttaaaaaaggaggtaatctaatgcccaagtaaaaacaattttatggtacttttatgagcttctgggaacaatggccatgtgatgttcagttgcgtgtttcatgtctgatgactgagttcacgtacgtcttagaggctaaatttggtttaaaatatcttacatcttctcaaattccttataacaagagcagtaaattaaaattaaatttcgaccttaaatggattgcatgttttccatttgtaatatattcgtatggttcaaaaatctgaaagagtaaatgagtacatagtaagagatttccttcctacatccccatcttcccagctccttttactccccctcccttctgcatgaaaactactgttactagttttttatgtgtccttccagagttttttctgcatatacaaacctaaaataaacatagattcttattctcctactttttacaaaaaatgtagcacattttataaatattttgcctcttgatttttttcttgcttaacataatatagagttatttccatatatacatacatagggacatttcttaatttttttatagctgcatatcatttccttgcactgaagtaccataatatatgtatatttcacaattacctgattcatgtatatttgactagtttcaaatcttttgatattataaacaatactgcaaagaatattatatatgcataattttatacagtaggataatttcccagtattggaattgctaggttagagtacaagtttatgaatgttgatcagcattgtcaaattgcccttgtatagggattgtgcttagttcggctcttaccaggcttatatgagattgttcctttttcctcagccttaccaatagagcatgttgtcagcctttggcattttgccaatgtgataaatacaaaataatacattagcaaatttttaacctgtgcttttcttattatgagtgaagtaacatattttcatatatttgagtgatgttcctctatacatgatttgtatcttttatttttttcaacattcaaatattttattgttgatctttttattatttatttctataggcttcatctaaattgcaccttttcctgtgatataaagtaaaaaatgtttcagaattatatcatttgtattttgactctgagtatcatctttttttctatttttgtttttttgtttgttattttctgaagaattggttgaatttttctagttcatttttcttcgtggcttctggatttttagtcataattagaaaaggctttccccttccaagattataaaggaaatctcctgggattttttgtacttttgtattatctttaatatcacataaatctctgattcatctggaattggcttgtagtaagaagtttattttttctttatatgacttaattattgaattgactatctttttcccactgatgtaagatattacccttattatacactaaattcttctctatgttgagcaatagttttgaattttctgttcaatctctttggtctgtttatttatgtgccagtattcagggactatatgttttaacatctagaatttctaaactacctttaataactgaaattgctaagctgttttcctatttaaaagtttttctgaatattcttttcttcttttttctttataaacttccagattaacttgttttattcaaacagctggtgttttaaaaatagaattttattacattttcaaattaaattgctgtctttatgatctcgaaatttattctcaaaattatgatattactttttcagttgtgtaattccctttgtttcctctaatggtgctttaaatcatcatataaatcttgcacatcaactttatcagctttatctcttggtattctatctttttcatcactgttgttagtgatttctatatgttgattttgaattctattttactcatcttttattgcttgtagttgtttttcagttaattatcttttatcttccaggtgtataatcatagcttctgtagtaaataattcctttgttttcctctttccaaatttgtatagatttaatttggttgtaactcgtctaatcgctttggattgtacctagagatcagctttaaattttatcagtgatcatctttttcttgtttctgacttctgggattctaaaattttgtcataaagcatgataatggtttttggtctcggttggctgtattttattacgttaatgaagtatccatctgtacagtcctagagttgtagctggacctgtgaacaccaccttaagacacgcatttctcagccccgcttgtatttaagccttacttgtatcacctagtgattcatgtgtgcccatgttcttgccattgtaacgtaagtaaaagtgatacttgccatttcttccacatcctttcttttcccttcttgctggcaggaaaccagaagtgatggcaacccagcctcaactatgtaaaggacaacaaggccttcagggatggctgaccatgagatggagggaacctgggtcccagaatcacttcgtggaacagactactcccctgaacaacaacttccgattattacttgagaaagaaaaataaacataattgtttttttttttttttttgagacggagtctcgctctggcgcccaggctggagtgcagtggcgggatctcggctcactgcaagctccgcctcccgggttcacgccattctcctgcctcagcctcccaagtagctgggactacaggcgcccgccactacgcccggctaattttttgtatttttagtagagacggggtttcaccgttttagccgggatggtctcgatctcctgacctcgtgatccgcccgcctcggcctcccaaagtgctgggattacaggcgtgagccaccgcgcccggccaacataattgtttttaaagccattttattgttgagttttttgttacacaaagccctttattaccatgactccacatttatagttgacccttgaacaatggggttagagggttaggggcaccaaaccccagtgctgttgaaaatctgcatataatttttgactcaccaaaaacttaagtactaatagtctacttttgactggaagccatactgataacctaaatagccaatcaacacacatatttcatgtattcatgacacacgtttttcttaaatttttctatatttctagtctgcacagcaaatctccaagcaatttttatgtatatttattttttaaaatctgcataaaagtggatttttggagttcagacccatgttgttcaaggttcaactgtagtccttttttttttaggtgattttttatttaatcaaatgatttatttttttttaatcaagtgatttttttttttggtcaaaaacctttttcatctatggaaattatcttgtgctgtatctctagatatattcatataaattatattaatggttttacaatatttgaccattcttgctttccctggaataagtcacatttcatataacgaattatttgttcaagtgcttctgggaatgtttcaccgatattcatacctaagattcgtcagctgtttttgtttcctgcagtctttataaagttttgatattagtgttactcttttttgtagaggaaagaataattttttaaaatttttccttgttctggggctattttaaaatgctggaattcactgttctttaaaaatgtggtagaattttcctagaaaacttccaaggccagaggtttcagagtattaataattggcacatttctctaattcatttgttgaaatcagattatttagagtttctatatcctttggggtcagttttggtgaattatacattactagaaaattacatatctcatccagattaaatttattttggcatagagctgaataaaatagtctcttttggcttttttatttttctttgtttttgtggctttttaaattcttattttcatgtttgtagtttgttcatatttccttgaatagtttagctgtgcttcatacattaaatatttttcttaaaaaataatttttaaaatgtatttattctattttttccctaactccataaatattaactaccctcttctccttttccattgattttttgttcttttctataaatttcattcagaaactcaatttccttattttctttattcttttaaattttttaataaaaattaaatgctctgagttttcctttgagcagtgctttagctatagctcatgaattcaggtatgatgtttccattaatattatatattcagatatatcagattgcataactctttgaagagggaattgttttggagggggttttaaaattaccatgagaaaatttttatttttctccagttttatcaatttctatatttaatgtatcatattaagagtatgttttcgctgttatttctagaatttgcctatttctgaaattttctttatagcctcatatgttatcaattttaataaatattccataaatccataaatatggattgttgaaaagaagataggtctttttatttctaatataaagtatttttggtatatcaaacatccataacacattaatgatgctactctattctcatagcttgagagaagagaattactctcttctcactagtgtgtttctgtctcttatttcctgtaatttcaggtttgtgaacattttgctattcataacaattttttgtgaattacactctcttgagttatacaatgttgttttttgcatcattttgggcctaaattcttgcttgtctaatatgaaaaataagaccatctacttggattcttttctgttttgccagtatatctttttccacattttaattttaattattgtgaatcagtttgttctagctattcttttaaacagtattgagcttggttttactttctcattcaatctaaatatctttgattttaacaagtaaatttaattgattgatactgatatagcaggtatgtttgttctgagtgctgccatatgttaaattttttgctttcatgtttgctttatgttctttaacagtctttcattatgttgtctgtgtacttccctttgttttaagtatacttctgatatgtgtgaaggtgacatatttattctattggctatctttataatttagttgttaaccttttgtaaactatgtttgtacttctatcagtttttttgatctgctttaatgatattacttgatttccaggaattttagtaaaataatcaacaaacattttcaacttcctaatttcttttcccctccttcgcatttttaaaaattttaccagttctgcttggcagagcacataatattaacattcttttttggtcatcccaaccctcaaatcttttctattatttccccagtcatatttatttggctgaagaccacctactactgtcgtcaagaaagattaaatcatttttgtaagtaaaagctgtttgttgcctttattcctaaaggacaacttgactcaaactttctttttctgaggatcttgtagatggtgctgttaatacatgttttatggtgttaaatgcaactgtagagaaatctgattttcatgcttataagtaatttactgtttttgctggactaccttacatattctttctttaccatttgaagttcaataactgtctgggttgtctacactgggttagtttttccttgcctccagtgtacctttcaatatgtatagtattattttatttcaaagacttttggggagcttatatctttaagttgtctttatgtctctctgtttttcctttttaagtactctgtcttcttctgttaaggctgctatcacaaattatcataatctaagtggcttatgaacaacagaaatttatttcttacagttctggaggctgagaagtctaagatcaaggtactggcagatctgtgtctggtgagggctgcttcctggttcatagattctgtcttttcactgtatcctcacgtaatggaaggagcaaagaaaccttcgggttctcttttatgagggcggtagtcccatgcttaaaggctctgcccacatgacctaatcacctcccaaaggtcccatctcctaataccatcaccttggaagttagggtttaacataggaattttagagggacataaatagcacactccaaatacgtttgttgtatctactttgcctgtcttctgtatccgtcatctagtctctcattcttttcaagtctttattttcattttattttgttctcctttttttaattagcctttatgttccttattctattttctgtagcttttttttatcatttctgtgatttcacgctattatttcttgagctctgacaggttatatttgagcatttcctcttgacttcctgtttcttcttcatgatcttttttttttttttttttttttttttttttgatggagtctcactctgacacccaggctggagtacagtggtgcattctcagcagctcactgcaacctctgcctcccaggttcaagcgattctcctgcctcagcctcccaagtagctgggactataggcacgtgccaccacatccggctaattttttgtatttttagtagagaaggggtttcaccatgttagccatgatggtctcgatctcctgaccttgtaatccacctgcctcggcctcccaaagtgctgggattacaggtgtgagccactgcgcccagcccatgatctttcttttaaaggcagttgcttcatttattttacaaaactaatgacaaaaattttggttagacttttcattctgtcattgaagaaattcttgtgctctttgtctgttggtaagtgttactgctcttttttttcttatagtaaccgcatatcagtgttgttccatctcctttgctaatgctcaatactgaatgaattgggtcttcatgccttaggtatattagcagaggtgtttgtgaggtgggaagatctaggcagtcttctaaacttcacatctgaaaggtgttctcattaggtggttccacagagacagtgtacttgctgctaatatggccccttcttcaatctgtctgtctattatgaatcaatcaatcaatcaatcaatcagtcatctctctgtccatccatccacccatccatccatccatccatccatccatccatccatccatccttctttcttttctgcctctctagtctaaactgtatttaggaggcttcagcagccagccctactcactgccatactccttctaatttttttttttttttttttttttttgagacggagtctcgctttgtcgcccaggatggagtgcagtggtgggatctccactcactgcaggctccacctcccgggttcacgccattctcctgcctcagcctcccgagtagctgggactacaggcgcccaccaccaagcccggctaattttttgtatttttagtgtagacggggtttcactgtgttagtcaggatggtctcgatctcctgacctcgtgatccgccggcctcggcctcccaaagtgctgggattacaggtatgagccaccacgcctggccactccttctaatttttaacacatggtgaggtgttgcatattggtatattctactgttattgtaacttcttttccatggtggtgtatttttgttggtattttctgagaactgttaatggtaagctacttaacctcactcttcacttcattttctccttaatttatttccttttgcttctatcagacctttgccctattgacaggatagttgagtataccaaaaatacaattttagcattgcagggtgccacacatgttgagaaaatatttttgccagtgtctttggaaatttgcccttgaagaaccaactattctctgtttctttttttttttttttttttttttttttttttttttttttttttttttttttttgagacggagtctcgctctgtcgcccaggtcggactgcggactgcagtggcgcaatctcggctcactgcaagctccgcttcccgggttcacgccattctcctgcctcagcctcccgagtagctgggactacaggcgcccgccaccgcgcccggctaattttttgtatttttagtagagatggggtttcaccttgttagccaggatggtctcgatctcctgacctcatgatccacccgcctcggcctcccaaagtgctgggattacaggcgtgagccaccgcgcccggcctttctctgtttctttataatgatttttctgtacaatatcagttgcctttgggagactatgtatgcttggaagtgtgaacattatatctgttctaacttttatgattaaggagtttatttttttcctcatttttttcttttctttgttgcttttgtgtaatacccagcaagtggaaggttatttattctgatgccttgtttgtactgtaatttgaaaactgacattttgggataattttatttattttattaagattttttttgtattggtggtcatgtatgtagtttaaaatgaagtgtggatttttaggctataaaattagccagggtttagaatggtaaggtggataaagcacatttactttttttcctccatttttccttttgaatcctgatgagtattatctagttttcatttttggtaagttctccacattcatggactgctttgttactattctgaccataaaatgcttgaatttagagttctatgtgagaaaagtgatccttgttgtgctgttatgactaagcatattgtataccacagttaggaaataaaaagcactttgcttcctgagataaatcatctatatgcatctatccatgtatctatcaattcatctatctatctgtctatcaccttatctagtactattccctcaaattaaggaaggcttgagctctttcttataagttgctaactctctcattgaaataattcattccctgaattttgcaaaactgacatccataaatttgtgatgacccttgaagatatgattaaaaaatgaagaaactgttctaccatgaataggctaattgtaactttagtagccttgtgatttttttttctctaaatacccgctgtgtccatttgtcaaagatccttgcaaatatttaaattttgcatataaaaaatacctttcaaagaatatttttatgtctgcatttttcttttaccagtgacatttcactgatcatagaaatgaaacccagagttattgctatatttatgaaaggatgaatgtataattgattaaggagatctatttaatataaagcttataattagggtcatgataaagtcttgaattgtaaatatatgttgtatttattgaatagaatgcaattagagaatacaaacctataaaatatgtaatattagaggtggaaacaagacaaagtttctttgacaaaaaggtgcatgtacatagatttaggtcagagattgactaatgcttaaaaataaagaaaaaatgaatcaatttaattgagataaatgatccatgattaggataagagaaagtctagctattcaattcagagttcacttgaatgcatgggctgctgtcaagtttttaataaaagtacagagcagcttcctaacagaggtatgaataataagtttatatgtctctgaaacaatgttaatataattgaatcaaagaaataattaaatgtataatagtcttctatttaaatttgttcttaacagtgcaatttcttatttaaattctgtattatgaatttaattatttttgtcaagattttaaaaaatcattattataaccagttggcaccataattacttttagggaaggaactgtgttgggtgcggggagcaaaacttggtaagtcacttgggattaaaggtgtgggactttgaggatagagcctccgtaacaggataagttattctacatgagaaaatgggaagtgtttattttgaactactatatggattgggattggaggctgaaggcagtcttctaggtatcaaagggcagggaggttttacctgacatatgaattattgtttcatgtaaatatagttgaaagtcatatatatttagaattttaaatacatagtttcaagacagtgcttttaattttttaagaaaatatgtgtcatttattttttccaaagctagtggaagtttctttgtgtcctaatagcaattgcgtgaatgaaatcgacatgaataatacttccagttagattttcataaactgacagatagtttcataaatacccaatatgtaatgatagtcagagggagaagctatattaagtgtgtatttcaggagagattgtcctctggagcatatactagcatcaggcagctgctttatggaaccacccaccaattcccttgggttgttgttattattgtttgttttttgtattttgtttagtttctagggaacataattttctttgtgtttctttttgcatgatgctgaccaagtcatgttcataaatcacatatgttgatatctacagtgctttcattggccttccaactcgagcatggcaaaatatgcttattttccttcagaagcgcatctttgtgttaactaggcattaacaatatgtgcttaatagcaattatcttatttctaaggatctcagagttggtttggcacattgcctcagtgctcttcaaacattatcagagaaggacaacataaacaataagatttacactgtaaaattagcctccacttacaaattcttttatcagccaatccttatcttaataacatatattaccttttattaaagtaaatatgtccctcagctctagcttttttctctgtatttttatgtacatttatggagttttactgaaatatttagaagactactgtctaaatacggttctaatttttaaaatgcataatctttagggtaaagtcttggagagtggcaagtttaatcaaacagtaacgctatcagagataaagatcataactcgcattaaattctataatttaaaataaactatgtctggtatgtattcagaaaatgtcagagctagaacatttagttcagtctctatttcatgggttaaagaaaagaaagcttagaacagtgaaaatacttcctcaaggtaatacttacagttcatggctgaagtggtaataaaagtcacaaccaactttttcctctctgctttcttttctttctgttctgtcattttaagtttcttaaaggaaaagcttagagaaaattaagtattgatgatagagcagatacaggattttcaccgggtgcagtggcttacgcctgtaatcctagcacactgggaggctgaggcaggtggatcacttgaggtcaggagtttgagacaagcctggccaatatggtgaaaccctgtgtctactaaaaaaacaaaaatttgctgagtgtgatggtgcacacctgtaatccctgctactcgggaggctgagccaggagaatcacttgaacccaggaggtggtggctgcagtgagccaagatggcactactgcactccagcctgggcgacagaatgagactccatctcgacattaaaaaaaaaaaaaaaaagaaaaacaaaaaaaggattgtgttaacatgggggcctgggtgagaagagaaaatttatttataggaggacatgtaggaagggcactgaagattactgtttaccattttgaattgtccctgctccagtcttacaaagtgggacatgcattgtgtttcttgggcatactcacttccctaagaataagctgtatcatccaatgctatttgcacagaactcacggctttatatttactgtcctaaaataagtgatttacaatcttttaaactttaaaacagtaaatttgattttcagcgatgcctttttttttgtcattttaaggccccctccaaagtgttgtaacctagctgaatgaaaaataagtggcatttttgttgttattgttggtgatgatacttttcatggcaatctttgagatacctaggaatattccaagtttttgaaaaatcatggttgggaattaccactctggaaacagattgccatggttactgtgttaatgctgtgattaatgcgtcttttagtcttgtatgtgtgtgtagatgtagacataattctatattctagtttggttaacatgtttgatctttttctatcagtcagagacataaaaatgtcttgactctcttaaaaacaagactgttcccattttttaacctaatggatatttgttgctgaggatcatttttttgtaaggagtgaaatacccagaaaactaaagtggtctagaagataactgctagttctacatttttttttttgtctgaagttgtgtttgaatttacttcctttcatcacttagtattaaaagaacagtgtgtcaattatagataagaattctacatcccctgtctttccctaagtacctgcttcgaaaaatgggtgcaactagactcagtagctagatgtggtatgtggaatgtggattcgttcgtatcaggcatgcttcttataggaatcctttaatgcactcagtcacccagagcagtcaaaggcctaagctgcttcatactttatagcagggcacagtcacttccataaatactgtgcactcccaagtaaatccagaatgtttgcaacaggatttgtgtaccatccccaattctctgttttcttcaataaagtctttgtacacaattgtttgattgtttttatctcttgatactcacaaataatgccactggagaaataaacctaagacatatccaactggatcactttatatacagagatataacatttcaacaacagaagcctttcttgttgaggggatgcacatttggaatactctcaaatgattattcgaaatcaagaaaaagagccaatgagaaacagcaaaacacaaatatctctaataaggaaaaatatttctgcaatgagatttttcttagatatatatgtgatgattaagagcatttgtttatattgtaggttcttgtcctaaacttacaatagtaagtgtagacaacactaattgttatggtaaaaggtgctacatgtgtgtatgtatgtatatgtgtatgtatatgtatacatatattatttggatattccagtcagtggtacttactgcccttggttaatgcataattgtcttgagaaaatgattatatgtatcagtgtgatctggctaaaacaactctctccaactgatcacctgattttgtttcatttccccgggtaatctggtaggtggccatttcttttctttctagtctatgttccctcctaaagataaaacttggtcaaacatctatttatggtaacctgtctttaagatagtttcaggcataccttcttcctttaatctcatttggttgatatgttagatcctttcctatcagccagagaaataaaaatgtcttcagtgtcttaaacaaaattgtttacattctttaattaaatggtcattttaaggagagaaatgctcagaaaattaaactgagtatagaaggtaactgctaattctacatttcttttctgaaattgtgtcttcatttgttttttaaaaatcatttagaagctgtgtagcccacagagaagttctcaagtttgtggaaaagaaataattaagtcccgaagttaggggtagaagagaatggagctttgttggtcaattctgacatcttagaacacctcagtaatgtggttctttgaaagcatcaaatcgctgcggttactttagaaaggtcatttttagaatgcttatactacttttcccccattttgaaggtcaactggggtttattttaagttagtattgatgtaaaagatggcacaccctcttctggggcataaatgcttgaggatgagccatagtcatgcatgacatgtgtcaagataagaaatggaaatttatctgcagagactaccatatgatgtatgtgtaaattttcagtccctgggattatgatttttttttttagtgaagacaaatgttttttgttagttagatcctgatttttggcatgatttagtaggagaaagaaggttttagtttagacatagcttttcttacatcttgtgtaaaattgtcagttatagggagggtaaacactgcactctggaaaggccttctggaatgtccttatttctgtgtgagtgtgatggaaaaaaataacttttaaaaaaatacatgtttaatgaaagatatttccaggttattccttctggattttaatttaacgcttgtttgtatctctatgatagcatgtatgaaaatgtattttaatgatttaattatctccccatattagatgatcttgctatctttatcatatgccctgtttatttttctattcctggtgataggtggagtgactgatacattgcaggtacataatatacatttttgagtagatatgtgtatgattaattgacattttgcaagcctttttttccaacttttaagttctggggtacatgtgcaggatgtgcaggtttgttacatacgtaaacatgtgtcacggtagattgctgcacagatcatcccatcacctaggtgttaagcccagcatccattagctattcttcctgatgctctccctcccacccctcaacagtgtgtgttgttttgacagaccccagtatgtgttgttcccaccacgtgtccatgtgttctcatcattcatctcccacttatgagtgagaacatgcaatatttggttttctgttcctgcattaggcaaaccgtttttttgtttgtttgtttgtttttgtttttgtttttaaagaaaaaagaaagacatgctatgaaatggccttggacctaattcaagaaacgaaagaaagtcagagatcaaggaagaaaggaacaatgcagagtttatggaagttagatgttaagatgacagctgagtatgcttcttttctcctcacccttgtttagccaggtgcttacttgacaatttgtaaattaaattattccttgaacaatattttgcacaggagtaaaggaatgcttcatggataaacagaggcaatacctggagctaatctttgtggataaatgtgtttattttgattcctgaagctgggatgcagaactgatagagggaagccagggggttttctctgctccaccaaataaatcacatatgactagaaattgcaaccagacagcaatctgtgaagcaagtgataggagctccaccgtctggtgcctgctgtggatgtctggcacccattggtaccagatttggtgtaagtggggcttctgtttaggaaactttgccaatttttttttcttgaaaagtggattttggctttgtttctgcattcttatatgggaataaaaaaatctcataattgcaaatgtgtttattatgccccaaacattagatctaggctattctttccataggatattgtaatcctgtgtgggtacatttgctgctgcatttgacacagtaaagttgtattaatgtttttcattctgctatcttttagaactaagataggcataattcctaatttatctgtgctcccccttatgcatacatttaggtagtcaaaccttgagagtttctatagaatatttttaaaacttacctttggtctgtcttatccttggaaatgttttcacgtttgagagcatcacctcctatcagatcattctgttccttgaccctctccctctgacaaatttcacatctttcttcgcaggaaaaaagaaactaaggctatatcatggctttcttcactcctcttcattctgatatgaacatttgaagcaagcattgatttttttcttccttcttcttacttttgccagaacccatgatgctgtttattctggtggggtgtgtgtgaaacgcatgttgcagttccatctctcttgaccttttctttgtttgctatgtatattgcatctcctcagttgtccaggttatcgcaagaaattgtgctggatttctactcgctcaccttctatttcttactaaatattccttgttgtatcataatccctctcaccagaattcctcctgtgtgaactcatagattacaatctacattgctgcaagagactaccaaattttccatctttctcaggtttctgcaccttcactcactcttatatctttccaaactttcctttccatctttcttaatgtcaaacctgattagtcattctcctgcttaaaatcttccaccgagttctcagggctttcaggttgaagttcaagctcattagtgtgacatacaaggctcttaggacctggtggtctcagcccctggctacttccctaaaacactgcccactcagaccagatctaactagttttagttccctatatcatggtatactactgcgattttccatgtgcgcttactttactcccaggtctctctatcctcttcctcttcatgtaactaatttcttcctggctctttgacactgggcatcagtgtcatgtccccagtgtctaatgtgatgtctttcatctgttctcttataggcttggatgcatctccttcctgtcatcttactagtattattgttcactgtccttccacggtggcacagagtccccagggtatatcatagtattgtttgcaaaggtctactaagagtaaatgagtaaatgaatctaataattttttattgctttaagtgctctgtattttaattcactgcctatcaagccttgctctctttgaattatatttatgtctaaatgttcatgatagcatcagattgaattaattgtagccttatatattgactctcaaacatgaccaagactgttattgttgactctatattcagacaaataaccagacacatagagtaaaagagttaacccatagtctgtatgacctaatgaaaagagcttagacaagaaccaaggagcaacagtctcaaatgtcagatgcctttgccatattactcccatttctttttttatagttaaaaatgttaaattttaaaggttaatgtgatgctgctaagccctctgtagggtgattgatcagcttaaatgtaaactattttggtgaccatgatatataaagtcatagtgttgaaaaaattcaacaatagttagaatcattttaagaaaacaacattgatatatgaaaatattcacaattgagaaatcttatattgatgaacttagagattatacattttggtcttgaggcagaactcatcttagtaaaactgcttaagaacttaatcttgatcttataaaataaataaagatggtattttgtattttaaactattgagtatgatttcttgctgggatctatcactatgaaaagtgattattggtttagagtggtgttctcgttattttgggttttgaaggagcacagttcatcctgttggtctgtgttaaccaggggtaggtaaagaggacagaggacacctagcaatggctcaggtattatcagtgagcagggtgagaaaatccttgtgtaccaagaggaattttgtcatggatttgcagaactttcaaaaacaagaaacattatttccacttttcgtgtgattcctctcactttttaacctcttttctcttttccttcttttcgagatggagtcttattatgttgtccaggctggagtatattggctattcacaggcatgatcattacacgctacagcctctgaactcctggctcaagtcatcttcccatctcagtcttgagtaactgggactatagatgtgtgctgtggtgcctggcagagcctcttctttaactgtaatagacctgcttatcatgcatgaaatgatctacaaacacaaagtaccctatcatcattatctctttggagtactatgtcctttaaatgtattttcttactgtaactaactacctaggctggaggtcctatctctaatttagaaatgaagaaagtgagacctacttggattgagtgagcattcgaagtacattcagaagtggaaattatttttaaaagttaaatggcttctagaggtcatgtagtctcttttgtcatatagtggagaaaacagagaagttcaagatttccccaaacgttcttagttactggcaaacaggagctaaatgtcattcttcctggattttagtcagtatttgcttggtcacttttcttagtagagctttttcttctccttgcattcataaacacttaataaaagtgaattgataatgatcatatatattatataattaggtaatattagccgggcatggtggttcatgactgtcataccagtttcatatattagaagaaaagtacaaattgtgtagctactcaagtgcaaaatgtagagagaaaacctagagaagacatgaaactctctccttgactaatatcttcaggctggggatactatgaacaatggtgtgttcagaaagaatgaacaaaattgctgtagtaactcaatttcagaagagtttgaccctgtcagaatcatctactgtatttgcatgagaaatatgaaaggagtccaagggaaagatgatgtgttcagtgttcttttccactgcattggagcacctgaggagctgaagagagaaacttgtgtttcttctttgagtggcaagtgtgttagttaatatcatcaggcagaacatgctttccaagagtttagtttgctccttcacaaactaaaatactctgaagtgcctgattttatgcaaattacttttggttgttgtattgagaaatgaaaggatgccaacatttttttttataaaccaaatactaattagcattaccaaatttatctgttgagatacaccacttatttgtaagagaagctctttgacaaaatgaaagaatatgaataaattcttcacactggctatatgagaccttggaatgtcattttcttttttttctgtagaatttgtgtaataccctccactttgttggactgaatgagatgcatacaaaacaaccttgtaaattacagcattctaggtcagaggctagaaatattttctgtaaaaggcaagagagaaatattttatgcttttgtgaaccataggtctctgttgcatctactcaactctgccattgtagtgtgaaagcatccatagatagtacataaacaaatgagggctgctctgttccaataaaactttatttatagatacagaaatttgaatttcatgtaatcttcacctattgtgaaatgttatttttctcttgatttttgtaaccatttcaaaatataaaaaatgactcttagcccacaggctgtataaaaacatgtagatttggtccaaggtctgcaattcactagcctttctccaggtgactgcctcactatgaaacagttccaagtataaagggattaggatatgatgctgatgttgggattgcatttactgagctatctaggtgattgactccaggctctctctctgatactgagaacatgccttggcatatgttcccagctaacgtttgagaaaactcattttcggaggaataattttctgttgtttgttgctgggagttgggcagaatatctcaggtagtggaaggaggatactgcaccacacaactcatagaactgaattgatacagatagatgtcagcatttctgtgcaaaaacaaatgtttcaaagttttgaggtctcagcacttttccaggcacagcattctggatcttggcacacagatgactctcagtttgaatagaaaatgctcacctttctttttgctagttttattccagagccaatctctttataataaagaaagcaactgaaaatggaaaactcactgagcttaaagcagccaaaggaaaaatatgtgctcattttaagttttttcttttgcaactcttggccaaataggtttatttttaaatacttttcacaatttacaaatgtttgccttaggactttgtgtaatggcattggttttatacagctattacagttagggtgaagagattttcttcacagagatggttttggaaaatgtctcatcacacaagtggtaagtgtagtcgctgtaattgtattgaagaaaagaaatgactaatgggaatcacaaaattgtgaaattgatgatcatttctgtttttattgcctttattttaaacataatagtgacaaagtctgaaacaatatttggagattgctacatatttaaatatttaatgcaacaagcatcccactttattataggagatagaacatcgactgtgcctaacctaaattacttttccagggggttttagtggattattttcctattaaaaaaaggggaaaaaagaaaagaacagtctggtacaaagtataggtgacggcttcagctttgtaattacctattaattgatatctgtatataagtataacaaataaagttttaaatactgaaaatgagatgagagatactaaaggaaacaatttcctgagaagtattaggttagactgtacaaatgtaaaaaacatgtcaacaacctggcagcaagtagtcttgagaccttgaagttcaatgagagcagatgaattgtctgctcttttaatagtaataaaaactatctaaggcaaaattttggcatgtaacttaagaaacttaaaaagtttctcatgctttaagacactttgattttattagatctagaatgaggtctgggaatgtatatttttataaagctccactggtgacctgggtcaagttttgcaatacagaatttgaggcagataatattatgtaggaggtaggagatttattggggagtgctagaagtaccaataccagtgggggagtgaaaaaagcatgtctgtagagcagaagaagctggactgcagagcagttgcagtagaatcccatctgatcctaaggagccctggagctggcattccaggccctggagagttgtcctggaatgaggcaaggaggagggtttgtacccttgcattcatcagtcatgggatacaggatgccccagggagtgggtgaaaacttgagggagatagctctttccaacagagggtagtgtccagagaaggtctggttatgaggtgtcagaagccaacacttgcaatcattggacgaatttcagtcctgaagttgtttctaggcagcacaccagtgtgtccattacaacaggctattcttatgattgaaaaacgattgtctaaggggttgttgggaagaagtacttggactggagggtaggcaaggagtatttatctgtttcttaaacatgtacggagtgcctactatgtataggtactagagacataaacatgaagagataagttccctacatttaaggagcttaccatctagtgggactcagatatgtaaataaataattaaaacataattgtcaaaacaggagggtatgtggtatgtgcatgtttccaggttttaaaaaagctttacttcacaaacaaaaatgttctgttcattctgcttattttgatttgatagattacagctcgcagagctaatattctcttaatgtaagtttcttccccttcacagatgtttttccatctcctctaatttctcatcgttctgtgatgagacaaccagagtctttaaaaaataaatactttgcttttctatgattaaatggtttgatgaaaattaagccataagcataaagtgctaaatagaataaacccctggcacataaaatgggtaggtcctgatatcctctttcaattcttcaaatgtataggtagatactgataccctgtctcaactgtagtcaattacactatatattttcctctataaaatgtatcactggccacgttcagtagccctccattactgaatggggcaattattcaagaatgccccagtgaatgcctgaaactgcacctggtaccaagtcctacatatattgtcttttttttatatgtacatacctatgataaagtttaatttataaattaggcacagtaggagattaacagcaataacaaatacaatagtaaaacaattgtaacagtataccaacatcactgctcttgtacttcgaggccatcatgaaggaaaataaaggtgatttgtacaagagcactaggatattgtgataacgcagacatctcctagacaggatctactggacaaagggatgattcacgtcccgggtaggagggggcaggacagagcgggacagtgggagacttcatcttgccacatagaatagtggataatttaaaaattaggaattgtttacttctgaaattttccacataatagtttcaaaccaagggtaactgaaaccatgagaagtgaaactgcagatatgggaagactcctatagaaaatatttgggctgggcatggtggctcatgcctgtaatcccagcactttgggaggctgaggtgggtggatcatctgaggtcaggagtttgagaccagcctggccaacatggtgaaaccccgtctctactaaaaatacaaaaattggctgggtgtggtggtgcaaacctgtagtcccagctatttgggaagctgaggcaggataatcgcttgaaccccggaggcagaggttgcagtgagctgagatctcgcaagtaattggttatttactacataaaaatgttacgtagtattcatatttatgtttgattgcatcacttttttttaaacttttggctcaaatattggtagttttcaaggaacttttctgcagcattatatgaatatgatgacaagtagaaaaaccaaaagggtgcatcaatgtatgaaagctggtgtgttaaattgttatcatcattaacaattcactgctgcatgctaaattcatagctcacacaattcaatttatgccttataaaattacaaactattacaagtcatggactttaaggttgctcaccaagttatcaagaaggtcaaaggtaaatgcaactgtactattctatggtaatttttcacaaatcccattgattcttgtttatgatactatttcataaaactcagggtcatataataatgttctgtttcaaaacatgttggtgtatttcaaggtctcagaaaaggtattgaaattttttggtgagccaaagagaacaggaaagatgatgttttgtctgtaaattccatgttgactctgagttagaagagactctaagggtcatctggttctgggctgttagttttgaggtaataacgttttcatttacaaaaagaacattggtaaagtaataaaagcttatttttgtatatatacttatttacgcacagattatacatgggaaaaatggtgcccaggcagtttgctttcagtgatatatgttaggtgaaggtcaggaataatattgacataagtaaatattggaatagaaggcaagacttggaggtgggatttaaacaaataaacaaagttttttttttttttcctttttatgctactttgcaggaaggtcatgtcaaaattaaaatagattctgctttctaccttggcaagtaacatgtattatgcccactcacatgtaggtcttatctgctttggcaaatacttacagaagaaagtgtaatttggaaagagaagaacataatgatattagacaaaatagggtcacaaaaatttacaattggaaaatgatttgtaagttaataaaattacctagagccagattctactgtctaaatataccactgaatgtaaacaagcttttgctgagctagtatagacaggtttgaaaaacttggttttctccagtactcactcttatcaaggaggaaaaaggcccagaaaaaaaattctgaagagtatttttgtatcatttacttatgccccatctttttctcaaatatatttaagacagtttatcagaatacatactatgtaagaaaataacataaataaggaaatcagggcaaacagaatgtaaggttttgaaaatgaaaaaggatctggggaatctgaggataaagttaacacaaaaaatgcttgaggatctgttcatctgctgaatgacggttacaaatctgtaaatattctgatagccaactctaagagaaaaacacagttatttcaatgtttatagttatcctggaggagcccaattctttctctaagtgggaccagagaaaaatttcccctttgtcctaagaaagaattcctacggagtatagggtaatcaagaactcatgaagctgtgtgtcctgtaatgccccttaagtagttagatgattgcaggccaagagcaatacagtcaaactgattttaccaggaagaaaaagcagtcagtccaaaaacaacattcttgtggtttgattaatccaaaattggttagattcaggaatggaaatctgcatagactttaggcaaacctcaataattatttctgtaaccaagattctgataattgttgaggaagtagtgaattcaagcttatgctctctgtacttcctgacaaatccttggagtgcatcactgctatgttgttagtgcgtgtggacccatatgcctttgatatttgccaggctggggatataaatgacatataaagatgttctaatgagggctactcactctcttttctctctcacagacacattcactcatgcccatgtatatacagataatcatatagacatatatacacacacataactattgaataatttgttgtttaaaaaatatgtttcaaattaatggggaaagatagattggggaacagatgggcgtcagacaatttgctatcaatttggctagaaatcaagttagattcctatcttacaagatatgcaaaacatagaaggattataaagtcaaattaaaaaacaaagtattagaagaatatatggagcatttttatactcttgcagtagggaaagatgctcagagcaaacatgaaatccagatcccataaaataaaaatacgaagtacttaggcaaaaaccaagaagaaataacaaactttggtaagacacaaatgatagtaaatgtataaaagtcaatataagtaaaattaaaagagaagtgataaacttggaacatgtattctaaacatacaacatgaagaagcttagtatctatgatttttaaagaatgtcaagatattaatatacaggaaaaacagcagaatagaaaaatgagtaaagaacatagtttttttctttttgaattaattgaatttgaaacagcggtttttctccttcgaggagtaggacttttcacaaagcttcagtggattgttctaaatactggaaatgatatggagaagcacgtctcatctttctggaaagcgatttggcaatgtatatcaaaccttaacattacaaatgagcagacccaacaaatgttcatataaaactcacacctaaaaatataccagacatgaaggcaaagctatatatacaaagggtgtttacagaaatattattcttatgtcaagtgtggaaaatactaaccgaagtccacatgtccaactgaagaggaattagggtttaatgatttaagaagatatcatgaaactattaaaattatgtttaatgttaattatataggaaaatccttgaggtaaagttttaaaagtaggatacaaaattatgtcatacacacacacacacacacacacacacacattttacaaaaaccaaaatatatgtatgatatgtattgttttacacatggagagatataagtatacacattataaatacaaattaatacttttggtcatacaggatgtctctgttttttgaaatacatttttcaatagttttgacatttttagccataagtatatatcaatagtgttatttgaaaaatatttaaacagaacataactcagttaatatatatgtactaaataaatttataatttttaagggcagaaaagcataaatatttcaggaaattctgaactaaaacacagttgaaaacttctaagactctatatcaatatgcaattgcaatgttaaataaaataaagatgttagcaaatagcacaatagtagttggcatattggaactagaatttcatcacgttatttgcaagacatctaatatgagtcatttgacccaatattttccttgtcttactctgggatgatgatacctctgtcatggggttgctgtgaagagtcagtaagatgtaatcaaccagcgaatgttaggtgctcagtacattttaattcttcatcctctttctctttttcctctcagcacagataccagatgtaaaaatgttatttatttttttcctagcactagtaaggagttgaaagtttttttccataaaaacagtgcccagttcttggtgatgacagcagggagacctttctcactcctcttcagggtgaaggtcagtgggttcgttccagttcattgactggttgttcacagctgacgttatcacgattagacaatgctttgccttaccaattatttaacgtaactgtgcttctgtctttgctcataaaaactctggtttggatacttcactcattgaaagcagcagaggcaaatcatcaggtatatatacagcttcaatgcctaagatattgggctacttttgctagttagcctgtggtccagtagccgcccccacaccccaccatctatttttggaacgtatacaaatggagaaagatacattaggttcctccattttaatctagttatttttttaaaaaaattataagtatgaattttaggctgtaagtgtaattttgttagatggatagattgtgtagcattaaagtcaggacttttagggtagttaccatccaaataacatatattggccagagacagtgtctcctgcctagaatcccagcactttgggaagttgaggcaggtagattacttgaggtcaggagttcaaaaccagcctggctggtcaacatggtgaaactccatctctactaaaaatacaaaaattagccgggcatggtgatgcgcccctgtaatctcagctactcaggaggctgaggcaggagaattgcttgaacccaggaggcagaggttgcagtgagccgtgattgcaccaggccactgcactcaagcctgggtgtaagagtgagactctgtctcaaaaaacaaaaaacaagtatattgtgcccattaaataatttctcattatttattcctctcctatgtccccacccttctgagtttctattgtctatctttttatactctgtgtccatgtgtatgcattatttagctcccacttgtaaatgagaacatgcagcatttatgtttctgtgactgacttgtttcaattaagacaatggcctccagtttcatccatgttgctgcaaaagacatgactttattctgtttttttttttttatggctgaatagcattccattgtgtacctattacatttttttttcccagtcatgcactgatggacacttaggttgattccatattctttgctgttgtgagtagtgctgtgttaagtatacaggtgcaggtatctttttgatataaagatttctcttcctttgggaaaacacccagtagtgagagtgcaggatcaaatggtagttctttaaactctctaagaatctttacaaaatcctgccactgtaggtataaaacaatatgtggtctcacttagaataaaatggagacattttaagaatgtgttgtttgaatcctggccatgttctttcccagaggctacagtttggtgtagttcactggatgtgcctgtggacactgaacttgactggctattggatttctgactcctggaagattttgaggagttgcagctcttgttctctttcatctcccacccatctccagaaaagtccaggttacacctgtggaagggttaccagccagaggacagagtgtgaaggcttgcctggtaatggcaaacccagttgccatccacatgtcatactttgcaccatgtccctgatttgtatgggttctgtacatgtcacagtttctaagagtgaacctctctgcccccccgcccacatgactctgctgtcagctttccaaacaatgagaggacagctcctttgaaagatgtaagttttccattccgaaagatataaatttcctggtcctgcagaggctagaaatacctcttgtttgggtcactggactcgggctaggtgatctgcaagatcttacacaatgctactctaatatttcctctgtctccagctgtttcatgactccatccctgccatgtgtgtgccttaccatctttttaagcagagcacaggcctgggcagtggctcatgcatgtaatcccaggctttgagaggattgcatgaggtcaggagttcaagactaacctgggcaacatagcaagaccccatgtctacaaaaaattaaaaaaaagccaggcatggtggcgcgtacctatagccctagctgcctggaaggctgaggcaggaagatcgcttgagcccaggagttcaaggctgtagtggaccatgatcatgccactgcactccagcctgggtgacagagtaagaccttttcttacaaaaataaagaaatagagtacagattgtaactggcaacagtgagtctgtctcctccctttcctcgggcatcagagtcaaaagaatgacaataacatttgctataattattttaagtttttttaaatgatatggcccacatatagaaaataattatcatgttgtcttctaaaggatttgattactagaattagataactgatttctttctttcaaaaagtggaagcttttttttgtttgtttgtttttggttaactgcattttaaattttaggaacaagtagattcttcttcagtcttaaacttcagcacctgctaaaaataaggattacgtattaaacattatattttcccccagttttctctggatgttactgcaaaaatttactcactctcatttggatcacaggggctgataaatgtgtgtgtttccagatgctgcaccaggactgaacctgtggagtaggaaatgattctaccttagatacacataccctcctctcctgtttttttattctaagtctccctagcctcttaggtttttgtttgtattaccctccctctttcctgcttccagccatccctattatgactctaagggtcccatgaaagattaggtcatctgtgatgctgtcagaggcctggagaagtcctccacctatgtgtgcgtcatggacacctggacacaggctaaaagcttcttgagcaacttggtaatggccttctgaaaaaaaatgcgctcagccaatgtattactaattctactgggggaatttccaagtcaatttctggggactgagagtggtacagaaggatgagggtgtttaggtacactttaaattcacagtgtatgatgtgccctgaccacccccatcctccacacacccactacttactcctaaaacaattttttctaagccaaaagtggtttatgacaaattgtatgtttgcagatttggagtctaaagaggagtagatttatttaagggccatatttagtgttagtaaaagctacacttactatgctaattgcaacttaaattagagctttacctttatcaccaaaaaaaaccccactgtcttcccttgatgttaaattgtaggaatttaaagtaatttaaatttctattttttctacatttccgctttttgtatctgtacaatatgattatacatgtgaatggttaacaaaaactgtatactttagtctttaagtggaacctcagtgcaatattttgtaggcattaaaaatgataagcactttcatcagactattagttttcattttgttgactttgtttgtttagttctttgtggtataccctgtagttataatgaaatgatgtaaatctatatatttgccaacacatagatgtatttctttttaacttaactttttagcattatgcaggaactgctgctcactcgctaattatcccacagcctcgcaagatggcatctcctgttttctagcagatcaggatcaaaactttggaatcatttctctttctcttacacctcatatcccatccataagaaattctctgcatgtatctagaacttggcacttcttaccactttaactgctaccatccgtcatcttttgcctggattattaaaataacctcacatctgtccttttcttgccattttatcctttattcattagccagaatgagccttctaagactgtagtcaaaagtcatacagctcctttactcaaaccctccatgaacttctgacctcattcagtgtaaattcccaaggtccttaccatgaccttcaatgccctttatcatctggtctattaatgccacctgacctctttttctaccaccgccctcaggtcactctgcttcagacataggggcatcactgatgtttcagaagcactgcagaacccttgcactaactgcttccagtgctaagaatgagcttactttgtataagcatggcttaattccttactttctttggtttctgtccacatgccactttctcagtgaggccttcgctgacttccctgcatgagctagaatccactctgcacctggcagtctggacattcttaccttggcttatcctctattatcctagagatgtctgtcttcatccccaacacctagaacagtgacggacacatgatagctacctcatgattatatttgaatgaataaatctttaattatccataattgggtagtagacccaatcttgcacaggcagccaagaaacaaaaccaagaaaaaaaaacttagtttctatgtagacctgccactaactagacatacttccttttgcaggtgtttaacatctctgagtctcaaatgtctcaagtattaaaatacaatagattgaactagacaatttcaaaagttctgcttgctctaataaaatactttacacgaagtaaacacaattccactgatgtttgttcaatattttctatggcaaggccattcctcattatatataactcaagtagataagtagcagttgttatttgtcatatgtatgtatgtacgtacacacacatgcacacacaattcaccctctcccacaatatcactgtgttacacaatcctcagtcctattacctctgagacccattgtaaataaaatgtaaaatctttagagcatgttggacaaatacatggttttggttctgcctctttccagtcgcagacatcactgtgagattatagaactctttccatctaggccaagactgggtctaagaattcttctcagacttctaggaaagatatcaaacttattagagttgaaactagagatgtaacatagattttattccaggttttgggtatctgagagcctagaagtggtgtgagataaagaatttgatacaccttctccagtctttttgcttggttttccttcaattcatccttccaaactcattgtagataccacttctcctaggatttttccccaaatccaagactgtgttatgtggcccttgttatctgattacctagggccctggtctcaattacagaattattatgttgtaatttctttttaattttaacttgactgcatcatctacctgactgtgttctctagaggttcagaccaagaattgcgttttgaagactgagagctgggcctgacacttactagggacacaataaatgttgacttattgaacagataaatgaatgaatgaatgatgcccaggatagaatatttggtactgctgtcctgtctagcacatttctccaaggtaaaattatctcccacatatgacaaaaatctacctttctcttggttaaatcccttagtaagctgcctatcagagaatttgagggttaactcattcttttagaataatgtaaataacttggatgggagcaggctgtatgctttaggtcaattagaccaccttctcatgcctgagggaaattgtcccttaaggtctgttctatggcacctagtcccctaagatttgacaagaaagcgttccacagttcaatatatttggaaaacattgctcgctggcctttccccttgaaatctggccatggacattagcttattagagattctgagtcatctagtaaagaattctgtttaatttttttatagctagaatttttcatttcttttgaacttaaggataatattcaacattatatatattaacattctactggactaatgctttaggaaacagagttttacacacatagaggccatttaatagctttaaataacagtgtagcagccatatggcagtgagcagattggatttggaaaggggtaaaaccagtagggaggatgttgcagaaatctagatggaagaggatgaggcctataaccaaagtcctcatagcggccacggagaaatgaaaacgtttatgcaagaaactgatctcgttactgaaaagtcttttgcaagagtaactaaggtggttagagaacaggaggttggtactgtagtgctttccctcttctgcctttcaaaggtaagagcttgacttcgtttttaagccagcaggggttcttacatagctgagtgtctatcactacttaatgcatgtataatgccctgctgtactgatattcatgataaaaatcaaggtatttacagtcaattataatttcttattctcaaagcatacattgattttcttaaactaggcttttctgaactgggtatgataatacacattattatcataccattattaggcctctctttccaggtctttcagtgaaatctgtgtgtgtgtatgtatgcatttcctaaggctgttggtgcaaagaaacacaaactgggtggcttaaaaacaacagaaaccaaaatcaaggtgttggcagggccatgctccctgtggggttctggcagatccttccttgcctctccctgttttctggccatgtctgtcaatccttggtgtttgctggcttgtagctgcaatgcttcagtctccacctctgtcattcgatggtgtctccctgtatgtctctgtctctctctgtgtacacattttcatctttttgtaagtacaccagccaaattggattaagggtctaacctactccattatgaattcatcttaactaattacatctgccacaaatttatttccaaataaggtcacattctgaggcaccgggggttaggactttaacacacctcctttgggggcccaattcaaccaataactacatctgtgtgtgtgtggtgtgcacgtatgtgtatgtgtttgtaagtgcacacgtaagatgcaccaacatagatgcaaagacgtttgtcttcccaaatttactagtagtatttctggctctactcccatgaaattacctttaccctttctctttgaaggatggacaaagccaggtctgataaagcgttagaatttgtcatggctggtcttcacgcggcaaaccaattatgtgaccacccaggccttttcatcatgcttggtacattcatggaatgttatctcacactggggttggtaatgcaatactaattctaaaaggctattctgattaatgtattcatcttggtttagcattttttatattgtttatttcagctctcctttcccttttgtgatctaaatatattttctttcaggttattttgctaagtggttccgagctaattttattacttttttgatggtaagggtctaggcagagtagcctttctgaaaggcaagctttaccgacttctccaggttcataaatattaataatgtgtaactacgactctgtgtgctaaaacattgttgtggagattgtacaaggaaggcattttatgatttcatggagacatggagtagcaagaaaatggagcaatgacatttggggggagcatgacatctaaatgttaatattgtgtactgcttactgagaatgagaatttctcttcttttgatgctcgtgttgtcagttgcacgagagtgttcttcaatttgtactttacttcttctagctattttttttctttataaaactgctagaaaagaagccagctagtattttgaataaaagagttgggattgtataaggcaatgtttttactcagctttcctcgaccttttgatgaaaattccagttcaaaataaaaagacacaggcactaccctctgagagagtctgtgtgaccaggctatcattcttaagaaacggattgaaacttcttagtacatctcataaaaaatttagttagctataaatgttttaggctgttgcagctgatatcatttgccttgtgggaaaaaaaaatgaggctgttttatgttaagtgttttgttttctcttctctctattctttttttatatgtattaggcaatgcaaagacttttactaccattgttatgatagtatttaaataagcagaccaaacccatgcatgggactgaagagtaaagtcaagaaatatttgagatgcctcttttaaattaaaggtatattcttcattgctaattttgagttcaattttttactgtatattaaaatgttaatttcaatttcatctatagcagatggtatcctgcttttattttctaaagggattcttcaagtaagccctcagttgtcttgcattatgagtaattagagaaataccttggttggtcctcagggcagagctaaaaatagagttcagtgatttttttctgtaattcttactatttttaaatagaagaaaatgataggcaagaaagaaaaggccatacttaaccaaaatgtccatgacttctttcattactaacaaaaaattgccaagcttgacagtttgcaaataactctcccttctccatgaaggtaacttggaattcgatgtgtgtgtatgtacctgtgtgagtgcatgtgtgtgtgtgtgagagagagagagagagagagggaccacaaagtctctgatgttaacaaatacaagaggaagagcagtagatgagggcagaggtgtggtaagcaattgatctggcaaaatcttgaaagttaagacaagaactctgggtgttactctgagatgggaagtgtttcgactcagcaatcccataatgggtatatattcaaaagaaaacaaatcgttttaccaaaaagatacatgcacttgcatgttcatcacagcactattcacagtagcaaagacatggaaatcagcctagggcccaccaacagtagactggataaagaaaatgtggtacatatgcaccatggaatactacatagccatacaaagaatgaaataatgccctttgcagcaacatggatgtagctggaggccattattctaagcaaattaacacaagaacagaaaaccaaatatcgcatgttctcacttacaagtgggagccaaacactggctattcatggacatatagatggcaacaagagactctggggacccttaggggcaggagggaacagggggagggttgaaaacctacctatgaagtatatgttcagtaccttggtgccaggatcatttgtaccccaaagctcagtatagtgcaatatacccaggtaccaaatctgcacatgtaccccctgaatctaaaataaaagttgaaagtaaataaatagataaataaatgcattaacttttttcatgaaaactaacaacaaaaaacctgagaagacaggccgcaaaaaaagaaatatggaatacatttaacctacaaagaaacaatatccagaatacataaggaacatctaaaagtcaatcgtagtaaataacataaaagcaaactgaaaaatacttcaaacgacattattcagaaaatgtatcctaatggccgataaacattaaaaggtgctgaacattcttaatcatgaaaatgaaaaatagaccatactgagatgatcatttatcatccagtattaacaaaaatctagaaattatgacaataagttttgggtaggatgagaagcaatactgctttggggtatacaattgctttggaaataatttggcattagctgtaaagtttgaagatagacctatttacaggttagtagtaccaatcctatatatgctgtctagaaacttctgtacatgtttaccaggaagcacatataagaatattcctagaattactgaaatggcaaaaaactgaaaaaaactgcaactatccaccaaaagtaggatatatagataaatcaatagactgatagattggcagatagataggagtgctatacagctgttaaaaataactgtaatgcagtgttactcatcaatctggatgaatttcaaaaccaaaatgctaagaggaaagtgcaagaagcagaaaagaccatagaaattattccatttctgtaaggtcaaaacaagcaaaattcagcaacatagtgttttgaaatgcattcatatatggtagaactatagagaattttaggagaatgattaaaagagattcagaataatggtcacctgtggagggaaggagggggctatgattggagaaggtcatgctatctacaaatgtgttgttccatttctcagtctgatagtagaaagatatttgaacatattattgttcttcaaattgtatatacattttaatattttataaatatattctgcattaaaataaaaagaaaataggaatgatatggaaccagcaacgacagacaacttttttaagaattttttttttttttttttttttttttaacgaaagctattgtcttctatggaaaatgttgtttgacctattagcacttgattaggttcccctccttttcctgaaacactataacttttccctatcatgtcttgtactaaatttatgctagctgcaatgctagataacactcctccagacaggtcttagtagattaataataaatgtttatttcttgctcaagtaagaggaaaaatgagattacctataagtagcagctcattttcaaaaggtaattcaggtaccttgtatctttaaatctggtggctctgctattttcaacatgtggcttctaaggtctctgtgagaggagaaagaatgggggcttgcacatgtgggacattttcatgagcaaggcctgcattttcctccatatgctgttgacagaactcaatggcataggcccgctaactggtaatgagctggcaagtgttgcctagctgtgtgtgcaaaagaaaaagagacagatttttttttcaatagctagccattttatccatctactttccaaatatccacttaaatctttcttctttgcttaggacccatttaccaagggtgacagtccagtcccatcaccgttttgagctcaaataacaatatctccaggcagtatgcagtcttctccatccattgtaaatgtgccttcttgcggtcttgcaatctctgaattaaaaagacaagttgtctccctttcacatcttcccctctctccagagtgggagacacataacattcactggtacatggaaagaataatattctgcaggagggtggaaggggtcttttcctagcagttctccttggctcttatcactgtaggctagtgcatagccccatgcctattgtatgactgcactgtgtcagagttcaatgagttcaagtttgtactattccctgttcatgataagaactatataatagttaattgctgatagtattattatattacaacaagctcaagtaccaagtgtctttgactttggctgaaattatgtgcacactaagactagttaccatggtcatcataagctataaatggtaattttttctatatattgtttaatatgtgtgtgtgtgtgggtgtgtgtgtgtgggtgtgtgtgtgcacatgcacacatccaggaaaaattattacttgacacctactttttcttgtaaacaacaatttatagtaaatatggaaggaaatttaaagggtctgtggcttgaacatgttggaaagtcttgctttaaagctccagcagatcctttctgtactaaggcacaaaagctatgatttttcatctgcccagaataataaaattatttacaaaagcactgagaattattctttatatgatttccaaccttcaagcttctgtagaaacattgtagctttgtaaaatgtggtgccttaccttggaaaaaaaagctttgttttgaagccgaggaatagtaaagaaaactgctatgtccctagcattaaaatcttatatcctcacaatgtgaacatgcaaattaactagaagaaactacattttaaaaattgaaagatttttttctgagatgcctttgcattttggttatctcttattggtcaaccccaggtcagagttaacacacctggctctagagtaatacacatgtacaggtgttgttaaaggctgcatgatggtattctgagcctctgctctgagctctgtcctagatataaagaatgtgcagccagctgtttgtctacttgtcctgaccctgttcaaggattaatgaagagatcctctatctgtagtccaatgtctattgggtagggaccagaaatgattgaacgtctttgcttcatgatacgctgtgccagtatacatgaaaatgggaacctaaaagtactttcataagcactttgtggaacttatttcttcctttaaaatgtcctagacaccttattgtcacctcttggctccctctggtttctgtattttcactggtacattggatcaccatggcagagccctaccctgcacccaacccaatagcaggaaggtttaccttcagcttgttccctgtatgctcagtttccggtggatttattactgtttttggttgtccccagaggctggcttatcatgaagttaaggatcttgatgcctcagggcttttcacttacatagaaccttccaagcccatgggtcttgaatctttgctaaatcggtccttgctctgtatggtactgctttaactgaaacacacacaggaagctgtgtccttactttgcacagatgtattattcaacactgtgaatactgtagtaataatttttggtattttccttgtaaaacaaagagaaaagaaaacaaaatacagaattgtgctgcttttattcactgagtagtgtttcaaatcaagctagctttctggcagtgtgacatcatggcttagcaaagagtccttagaattttctaacttttaacaaaatggggaccttaaacaatctattctctgaaaaataatgttgaggtttcacagtaggaatgaaaagggtgggacgattatgatataactaactcaatttttaatgaataatgaattgcagagttaatgcttgtcagaattttccaggaattagggagaaaatgaggaagaaaattttacaagtagagttaagaggaagaggtagatgaatgcacgatcctgcttttattttatgactattaggatagagatgtttgaaacctgctgagtagctggtggaaggggaaggcttcaaggataaatagtagatggccatgcttgtcccccgacacagggaacggcctgcgcaaacacacttggtttgaggatatctgatgagttcaaagtgctttaactactaagcaggtggaatggcaggatataggagtcgtggcggccactgtaaaactcggtggttcagatgtgggtgacatgatttgcaaatataattacaaagtgatacgaactgttaaattggacaagtttagatttaggtgacagtaggacttagaagagacatctctatatttcctatgctaagctggaggtaataggagaacaaactactttatccacccctgaaaatgagactgttttactgatggaaacatcatcgtcttgaccatgagaaaaatccaagctagaatcctggccctgtggtttactagccaagattctttgaggggcattaatatttctttatgtatacattgagactctgtgatgatacctaccgcttatgcttgctgtgagcatgaatgagccaagatgtactgaagagccatgttaaatacctgtagatagttaataaatagtatctttattgttatcaagtaaatggaaagaattcaaaagaagggagaaagagagaggaatagtaaaatgtcatgagagctggaggttatttgaaaaatacatgttaatcaattgacgttatcaatcaagtaatcacgagattaccacagatacccagcttggggacaggaccacagaagaataatttgtgctgcctctcttgacgataactactttggttgaaattctgtatccctcttactttgacaaatcagaatcaagcgtggttgaatcttaaagactttttttttttctgaactaactcttactagttggcacaatagttaaatgtgtaggaggaaaagaggatgacggagaatgcatattttggtttggagagaacaaaaactgccctaggataatgtttgaatacatggccaccaacaagcccaagcttttgtggaaaaacactaaaatggctaaagcctctcagcataactgctttgctaatttaagtgtttgctttgagagtatgtgaacaaccgaattttcttagttaaatttattaaaaatgactgtacaggatggaattggccaatcagacaaaaacagttcaaaattagacgacgtttttcatcacttcacacttttgcagtgtttgctacaatcaagacactgtgcttagatgctgaacgtgatgcaaaggagttaaagatgtagtccttaccattgatttattggaagcaatagcatattacaaatactttatcttgctctacaggtaggcccgatacaagaagtgttggctatgagtaataatttggaggttcttcaaaaaactaaaaatagagctaccgtatgatccagcaatctcactgctgggtataacccaaaagaaaataaatcagtatatcaaagaggtatctacgctctcatgcgtgttgcagcactgttgacagtagctaagatttgggatcaacctaagtgtccatcagcagttgaatggataaagaaaatgtggtgcttatatacaattgagtactctttagccataacacagaaggaggtcttgttatttgcaacaacatggatggaactggaggccattattttaagtgaaataaaccaggcacagaaagacaaatgtcacatgttcttacttatttgtggaatcttaaaatcaaaacaattgaactaatggacctagagagtagaaggatggttaccagaggctgggaagggtagtgggggctggtggttggggaggtaggggtggttaataggtacaaaaaggtagttagaaagaatgcataagacctactatttgatagcacagcagggagactatagtcaataataatttaattgtacattttaaaataacctgaagagtgcagttggattctttgtaacccacaggataaatgcttgaggggatggataccccattctccatgatgtgattatttcacattgcatgcctgtatcaaagcatcccatgtaccccgtgaatatatacacctactgtgtatccacaaaaaaagtgttggaagagtgttgtgggatttcacacaaggcactgcctgggtttgtgtcactgctctgctctcctataccactcttgtcacataagcaagagacacacagtctcatatggagtgacaaattcggaaatggaaattcttttacagttaattaattcaattcagagtgtctcctcatcatcatccagcatttcctgagggtacctgttttgtgtaatgtggtaagcatagtctcttctcttatattcttccaattaattactttttctagagtttaggcccttctgccggagggagatgcctgtgtggtcacaagaatatttttctccctgcctccactttgttttggtgaccttggccatgttagttggctttattaggcttccacttcacaatctgtcaactcgattaacacaggcctccctggaatacctggctgttttgtttaagatgaatctaggaatatgacttgtttcaaatccacatgtcatcttgaaatgagcttgtctgggtctttagggttgaaatatatcccaggcttcttggctgctgatgtatatttactattttaacttcagttatctttttagtctgaaggctgaatgacttcttacagtgatcaacacaaagattatccagtagtctttggttgaatttattgtcttgacttcaatactatctatcagcaatactttgcaaggtcaacttttaaccatttttgttgttctttgccaaacattgcataaaataaaatataacctttcttctaccatattgtaatactgttgtaaaaaattaaatgatttcctactattccagtttattctctgtcaacattcttttcatactaaaaaggttggttttagcttatagatgaaatgtttttctccaaacttatttatgataataacaacaaatacttttatagtgcttagtatattccaggcactattataaacattctaaacaccttctgccattaactcattgagtcctcacaataatcttatgggtactgctaattgtgcccatttcacagatgagaagattgagggcaaagaagttaagtattttgcttatggtcacaagtgattgggccaatgtttgaaccaatcacttgtctgaaattttgcctttaactatttcacattttgcctcactgttagattttagttctttgttctgaatttggaatgcgtataaccatacaagcaaacacaaatttttattttttaacttgtaatattatggctgacctagagcagtgacatttttagtccaagacctagatacagacaacaggagatcatgtgtaaagaaaatagaataaaggtccttttttcttatgcagggccagcccaagataaaattttgtaataggttgaagtatatctttggcatcttttcacctttctctccctctctcaatttttggcactcctcctttcactttcatctattttttgctccactttgattagcagtagcctgtctaatccctgagagtaacccatacatcagacagaaactccaagtacagtgatacgggaatcaatgtaccctacctctgaccctcaaatttctcctctcagattctagcctgagaaaatatactgaaatgcaaaggtttttgcataaagatgttaatcacagcgactttcttttcagtaataaaaatttgaaaactgcctaaatgtacaacattggaagaatggttaagtaaattgtgcattatacaatacaatgcagcattatgcagccattaaaaactatgtttatgaaaacttctccatgacagaggatagtacataagtttaaatgctaagaaaattcaagttgaaagtagtataatatcaactctagaaaaatacatataaaacaaggaaagaaaaagctccaaatattaaatgtatacagattggatataaagtgattatttatagtttattccgttttctaatgtattagttttacaatctagaaaaaataaatgatcagtttttataaaaaccttcattcacaataaattgcaattttttcttaatcctcctagatatattgtcattttcaaaaatgatacttgccaatcccagtgtctttaattagtaggattctaagcagcacaagaaaatatagaaaaagattgaagaagtgtagagggaatatattcaaagtatgtagtatgtaagctgaaatagagcaaccgcaattgaattctcagatcactaaacttttcttgctttacacaaattttatctttcttaattcaattttttctttttcttttgtgctttctatttaaaagttaatgttttgttttgcattatattttttttcctctctgtgttggaagcaaagacagtaatgggaaaaggggacaagaaacggggcaaggatacactgaaggtgatatatatgatatatatatatatatatatcttcatagatggtggaattataaatggattacatatatcagatagaattaagtgtttgcaaattaaggcttgtttatactcttttgcaagcaatattttaaaatctgtttgtttattttttttatttttggaagccaagccagcagttgtttaaaattcatgcctctgcataatatatgaagactacatagatgagttttctggagatttctccttgacacatttagtttctccacgttgcttgtagaaaggatgattccattctctcaataccaccttccaccaggagaagccattttctttcctgaaggtcaacctacagccacagtagaagaggaaaccagttactgtgattccaaatataatttcccaggaggtgaaattccctctcctaaacatgaattggttacaggaaaagaaaaaagaatgtaattcgtaagactgtggagccattttcctaatccaatttctcctgtcccctagatcgatatcatgtgaattgcttccacaggggactgtgctagcagagaggggtctgtggaaagaaagaagcaccgtgctccaatggaccattattattgtttccatatcacagggtccacatatgcatgtaaatgtttttatagtacacatacacaaatgcaaaactgaatgtctaactaatgtcaagcacggtcacatacacccacactctctaatttcctgtccaaggtggtgatctgtaaaagagaggtgaactgtaagagctgaatgattagaaaataaattctaaaactcaagtgcacttaacagtggacgtaatcagtagagagaactaagacctttaggattctgatgcatctgtcacctgtaagtaaactgacagttctgtttttttaattattattaagcatgagttgctatataaatcacatctcattacaacaagccacaagtgactatctacatttttatgcaaaatgaatgctatcctactaaatgagcattgcctaatattgggagtcttttcttggtcatgcagtgatatttgctgataggggatttgacctgtcatagctttcttctagttttgtagacatttcttgttctctacctccctggttcccagcgtgcttatataatttgacaatatcttttggagcaatttgaaaatatgaatctcaggtcattggaatttgtgtattctaataaaaactggcataataattcagaagtggaattcattgaagaattatgggctcccaaatgctagtcaaattattttttatagaggtggaaagaaagggtcattctgtttttatttcaatccccaaagtatagattaaggcagcagtattctaggtcttacacaatcataggaggtgggtaacattgcaggagaggaggaaataatattcgttgactgtttactattggcaagacatcttaccaacagtttaatactctttgcaactctgagccagttggctctctctgtatatcacttttggaaaagctgaaatttgtaaattagtcccaaactctaggtcagagggtaggggagtgaaggaaggtttcattaaataaatggcccttgggctagtaattaaagatgactatgagttacctgagtaacaaggggagggaacagtgttcttagtagagggaacaacatttgcaaagaatcttcagtgggatggagcttaaaaataaggcaaacatggctgaaggacagagagtgtgggagagtactatataagctaagagggaggatataggcaggagctagatcaggcagtgctttgatggccattttaaggaattttaagcaatgggaagcttgaatcaaagactgtaacatgagcagatgtgctttttcaatacattattatagttgtggtgtggagaactgactgtgtggacacagacagactttcacttcaatcatctggatgaaacagtggtagcttagatggatgtttgtggtagagatggagagagatagagagtttggggacgatgggcagaattaatagaattcattgatatgaagatgtgaggaggtgaggaagagaaagatgtttaaggtgacatagaactctgcatcatataataaaatggatgggggtgccgtttatggagatacggaatgctcaaagacctgagttttatgaatttgatcatttttctaaataagtgcttgattaggagcatggatcacctatttggttttgaacatgtatttgccattcctgtgactcatgtaaaagaaatgtgaaaaggcagttggatctggactctagaagagaaatctagattcacaaactcgggaatgagcattgatgagaggtggagaactacaacagttattagccacatccaggagaatgagcctacaaggagaaacagaataatccaatagttaggaggaaatcaggaagatgactgttttgtggaaggcaaggtaattgatgtttcaaaacaattttgttggtttttgataatgtggaagttatgggcaagagaatgcttgggatgctcaaagaccagcaagaagaacagagtgactggagctaagtgggcaagatgattagatttaaaggttgattttaggtgtgatgagaatgcattaagaggttttgagtgaagaggggatatgacctgctttacattgtcactggactacagtgatagacagtgaaggaagcagggatggaagggcttggggggagaccaattaggagactgtgcattcaacattcagctagtatttatttaacatccagtatatgccagatatctgtaatctaggcttgtcatttggacttggacaaggaagaagtaatcaaatttgagatatattttgaagtcacagccgttgggatttgccaatggattgaaaatcgggatgtgaggaggagatgaatcaaggataatttcatggttttttggcttgggcaatagagagaattgcagtggggctgagactggtagccatagacaaggaacagaggtgaatagggagaggagcacgagttcagttctggatttgataaggaaatggtaatttttgtttataagattcttatgaggataaatgaagtaatgtctgtaaaggactttataaagagcataaacacttatcataagattattgttgttactattattagagtgggccatagtgaaaaccagtattctgatttgttgggccacctactgtgttttattcttggctttgtcactaacttgctgtgtcactttgagcaatttattggttctttctcaatctcaatctcttcctctctgaaagtttccaaagtgaacattagagatggaattgactagaagatcaggaagatcccaatcagctgtaacacccctatgatataaggctgattagtattatctcagtattattttttacattattgatattgatattttacttttatacagaagccaccttccaaagtagatttatcatattctaatgagcattgtgaatgatctcatttcagagataaaaatgttgaagggctttaattatatttaaagaaaaacagcaaaaatgaactcttatgatgaaaatcagtcatcaaaaaaaaaacctgagagatgagaaactacaacaattatccaccctcccaacatgtatgcagctattttgaaagaaaacatttggtacctgttgttagattttggaaggttacacacaaacttggaaaactgtctaaagaaaagccaagggatttttgagttttaattacttcttttaaaaagtaaacagtagtcaattaaggagccataacttgtcttctattattaaattaatggaatcatgcagtaaaatatcagtggagactgcggcattcacctggacagacactgctgttttaattatctatagagtcaaatctatccaaacaatcactctcataatgtaagagaaggaaagaaaaactaaaaactagtccatctctaatttttctcatatatcagggtttttttaagtttacttgctcttcttgcctccctgactcaatttcatccctagattattgcagcaatatcagcaactattagttattattttagttcataactatttgttattctttggatctaagttactagtatctagagtggttctgaatgaccaggtatgagcagtgtggaggattggaaagcacatattctgaagaggtgttgaactgaaacacatccttctaggtacttagctgttttgtttctaacaacttaaagatgttaaagtatgttgttcacatctgcctcaatataagtggcagaagcaacattcctggtatgaaaatatgcacccagagaacttaaaatttccttgatcaatgttaacctgctgttgcagccaatgacatatcttttacctagagctagaaggtactaaggatgaaatcttgtgggattcccatgtaatatagtctgaatgtgtgtctctgcccaaatctcatgttgaattctaattcccaatgttggaggtggggccttgtggcaggtaactaaattatagggatgagtttctcatgaagagtttagtactatccccttggtactgtcctcatgatagcgagtgagttctcctgagatctagtctttaaaagcgtgtgatgcttcgcccctctctctcactcttgctttggccgtgtgacgtggctacaccctctttgccttccaccatgattgtaagtttcctgaggcctccccagaagctgagcagatgccagcatcatgcttcctctacagcctgcagaaccatgagtcaattaaatccccttccttcaaaaattaaccattctcgggtatttctttatagcaacgcaacaatgaatgaatacaccatgggatgctgctgatgtttggatatcctctcacttctaatccctggaaagaaaaccttgcattccagagcattccatctaagcagctggaaccactccttaggtaggatctcagtggcccctgtaacaagtactatgattatagtggacaagtacaactgctcctatctattcaaatggaagaatgaagggacaatgttatagttacaaaaagtgcaaaattttattgcaaaacttcctagtaatgattctaattatctttattgaatgtctgccattttctaggcactggagtgggggttgatttggtttcccttatctacctattcaggtagataagggaaatttacgtggaagctgaagttccttactagagagagcattatcacctctaactctgaacccagtgggcactgctagttttgtagttcctggagttgcactctgcctttttttcctcacacttataactacttctccagctcctgccctggacaggcctgcactgctctgggcattctgcccactaatgactagtttttggctcatttcctccagaggctgcacagggaagagtgacctgtgtggccttatctgtaccatagattttctttcttgtgtccagctgtaatcccaatttatataaacatgtctatacctgagaccccagtcttgataccccaacatataacgtcttgctaatcaccctcacatagccctttaagaaggtattttataattaagagacttgaaactgagaggcttacttgcccaaggtgcttgggaatgcattcagatccacactgtgtttactgtactgtgctgtctccatcccattgtacattactcatttgtaattccagctgcttttgtttgagtgactagcaagtgttcaagtttcactcacatgccatactcttagaggaagtaaataacgtgtttcttgaacctcactgtgttcaggaagtactttatttaaccttgcctgcgggttaatgaatccttgctctgcttcctagggctttatgtatgattaaccaatatacctgactatatatttgaaaagttggccaaatactatatctggggcatggggttccactgcactgcagcagcgcgtatttacttgctcccagggctgtccactgttatgagagagagagaattcctactctgcattctaccccatcaccaactgcaatgtgagaagcgaatcacaattattttctcagtccctgaagtatttgctccagaaggctttatttgatgctagaaaaagattttcccataggatcaagcttgtttatggtggttaagaagaccaagaggggaagaaaatctgttagggcaatgtcagcttaagagagaagctgaaattatttattttagcaccttatttctacatacccctctgtttgattagctagacatctaaatccatgcaaagcattgtttatataacacaatctgcaagatccttacagtcatagcatcttcatcctccctcccctatgtaggcttacacaattgagaggagacaactgaagtctcaattcacgtctcacatttcacacaaagaacatcagctttttgtatcatttactctttacaaacatactattgattgccataaaaaattatctctgataacacactcataacatcctatctgttatttacccatctctgtgaaactgattatgagatttttcccaggtgactagcaggaagcaggtctgttaagggcaaaggaggaaggggtacagcttgttttgtgctgaaagaagaccagagaagtcagtgaagtcaacctcctggacacagctttttcccaagctgaccctgttgactgaggaatgccgagttacattaatgatggacactgtctgcccatcatggaaagcggagagctacatgtgtgggaaagggtagtaaactcctcctccacaactgtgcctccttccaagcttagatgacagaatattagtgtctgttatccttacgacatctctccatctggtcctctcaggatttactttatggtctgttttatttcccttttactactattagaaacaaacagctgaaaggattaatcaaaaatgttactgcttcaaagagtaaaaaacatgttacctgtttgactggtgcccatatatagttaagagtttctgaaggaagaagggtcacgcttaatagatttgatgagtccattaagcctggcttccatcttgttgctttgtttgtgcatttatttccattttggtatcttagcagtcatcttcttttagcaaacattgaggtttcagtctattgggtcagggtattagcaatacattaaccaaaccgttgaagacaaggggccagacatattcaaagtgtgatccgcattcaatatcaccattctcttgcaattgcaaagttataggcatcctttggatttttgcagcacttattttataagaaaaggagtaaataaagccacatctctgggatatgctttgagatgtttaagattgggaacattttcaggctgtctcaatactggaaatttgttgtccttttttttcacacattttctccctcttatactactctttaccaaaaggtgggtaaagataaggagatgaaaaaaatgttgcttaagtttttggttgccagctctgttttaagcctgacatagaagggggttgaaatttattttcatcattcagttaagagctattcttggctttcacaaatctcagtcctaattctgttattgtttcagataatgtagaatttgtcacattggctaaaaaaacaactccactaaatcaggacattagttttacatttcactgtgctacattctaaaataaaatgaccatttgtgctggggatgattttagaaaagcgaataagtaatataaagttttcctggttttctcatgggcagcctagaaaaatgccacaccaagactcaagaaattacattctgaattttgcatgaagataagacttgaagaaatcttatttcaacttatactttcctcagtttatgtcctgtaggaggaccctgtagagggggaatgcagaagaccagagggaagaaaatagatggtgtcaattgttatcaacacacgatagtatcacatttttattgagatataatttatatataataaaatatgagagttaaagtattaagttcaataaattttgacaggtgtatatacttgtgaacaaaacttcattaagatacagatgaattctgtcattctagaaatttctttatgcaccttcccatcctttcagaaaattcctcatgcccctcactcctccttctcctctatcactcatagaggcaaccactgatttctgtcactatagtttagtgttagctgttctcgaacttcatataaatggaaacatacagtgggtactctgttgtgcctggatttatttatttatttatttattacacctttaagttgtgggatacatgtgcagaacgtgcaggtttgttacataggtatacacgtgccatggtggtttgctacacccatcaacctgtcaactacattaggtgtttctcctaatgttatccttcccctagactcccaccccacaaaaggccccggtgtgtgatgttccccgctctgtgtccatgtgttctcattgttcaactcccacttatgagtgagaatgtgcagtgtttggttttctgttcctgtgttagtttgctgagaatgatgcaatcccattactgggtatatacccaaaggattataaatcattctcctataaagacacatgcacatgtatgtctactgcagcactcttcacgatagcaaagacttggaaccaactcaaatgcccatcaatgatacactgaataaagaaactgtggcacatacacaccatggaatactgtgcagccataaaaaaggatgagttcatgtccttttcaaggacatggatgaagtgcctggattatttagcttggtgtaatggttttgagatttatctgggttgttacatgtactagtagtttatatcttccattgtgtgagtatgccacacaatggatatttgggttgtttccagtttgggaatattatgaaggtgccatgaacattcatgtacaattttttatgccaattggctttaatgtctcttgagtgagtacttagaaatgggacggctagagcataagctaggtgcatatttagatttatgagaagtggttagttttccaaattggttataccattcttcactacctgttacccactgaatgacatactctgtgttctagccaatgctttaatgtcatttacctttttaatatgttaaagggtgtgtagtagtaactcactgtggttttaaatggcatttctctgatgaataatgatgttggataacttttcttctgcttattggctacttacacatcttcctttgtaaaatatctatgtcttttcactcattttaaaagtgaatttgtcttcttatagatttcatacatgttccttacgtattgtggatatgattctaatatgggaattgtgaatattctctcccagaatgtagcttgccttttcaatttcttaaaggatgtcttttgaagagaataattttaaaatattgataaaccctattttatcagtgttttctgttatcattagttttagcatactgtctaagaactatttgcctatcaagtttatgatataatctctttttttttcttctaggatcttcagacttttagcttatacatttatggcttatataatccatctcaagtaaatcttcatgtatagtataaggtcaagattaatttccttttcatatacatatccacttattctagtacattcatcaaaaagatgtttctctccacatttaattgcactggtgccttttacaaaagccataagtcacttatataagtgtgagtttattgatggactccatattttgttgtctatttgtctactgtatgccagtaccatactcttagttaaattttaaagttagttagcatacgttctctaactttgtttttctcttttaagatgttttagcaatttgaaatcctttaaaactacatatgaattttaacatcagcttatcaatttcttaaaaagctggctcagagtttgattggtattgctttgagtctataggttaatttagggagaattaatatgtttacaacatttagttttgcaacccgtgagtctattatctctctcaatttatttagatcatcactaatttatctcaccaatgttttgtagtttcagtgaagatagcctaagtcttttattaaatgtattcacaagcgttttctagtctttgatattgtaaattgtatagaattttaaatttaactttcaacttgtttttaatggttagtagcagttacttcctcctctgatatcctgaacccctcaaagttacccatgcggattggaatcaactttgtccaaactcttgtaaatgttaatattttgatttaaagtgaaagttgtcctgaatggtaacgcctaggttttcttctagggtttttatggttttaggtctaaggtttaagtctttaatccatcttgaattaatttttgtataaggtgtaaggaagggatccagtttcagctttctacatatggctagccagttttcccagcaccatttgttaaatagggaatcctttccccattgcttgtttttctcaggtttgtcgaagatcagatagttgtagatatgctaccattcaggacataggcatgggcaaggacttcatgtctaaaacatcaaaagcaatggcaacaaaagccaaaattgacaaatgggatctaattaaactaaagagcttctgcacagcaaaagaaactatcatcagaatgaacaggcaacctacaaaatgggagaaaattttcgcaacctactcatctgacaaagggctaatatccagaatctacaatgaactcaaacaaatttacaagaaaaaaacaaacaaccccatcaaaaagtgggcaaaggatatgaacaggcacttctcaaaagaagacatttatgcagccaaaagacgcatgaaaaaatgctcatcatcactggccatcagagaaatgcaaatcaaaaccacaatgagataccatctcacaccagttagaatggcaatcattaaaaagtcaggaaagaacaggtgctggagaggatgtggagaaataggaacacttttacactgttggtgggactgtaaactagttcaaccattgtggaagtcactgtggcgattcctcagggatctagaactagaaataccatttgacccagccatcccattactgggtatatacccaaaggactgtaaatcatgctgctataaagacacatgcacacgtatgtttattgcggcactattcacaatagcaaagacttggaaccaacccaaatgtccaacagtgatagaccggattaagaaaatgtggcagatatacaccatggaatactatgcagccataaaaaatgatgagttcatgtcctttgtagggacatggatgaaattggaaatcattattctcagtaaactatcccaaggacaaaaaaccaaacacctcttgttctcactcatagatgggaattgaacaatgagaacacatggacacaggaaggggaacatcacactctggggactgttgtggggtgaggggagtggggagggatagcattaggagatatacctaatgctaaatgacgagttaatgggtgcagcacaccaacatggcacatgtatacatacgtaactaacctgcacattgtgcacatgtaccctaaaacttaaagtataataataaaaaataaataaataaaaataaaaataaagtgaaagttgtgtgactcttcctttcacttgaaaacttagaggttcctggagggttattaattgttttaatttcactattgttttgtctcagggaatagggaggccagaggagagggagtgagataaggaacagacagtttgtggagcagttagaacacacataacatttgttaagttgaccatcttgcgtgggagtgatttgtggtgccccaaagccattatggtagtaacatgaaagatcattgatcgcagattaccataacaaatataatgataaaaataatgtttgaaatattgttagaattgccaaaatgtgacacggagagatgaaggaagcacatgctgttggaaaaatgatgctgatagacttgctgaatgcagggttgccacaaagatttaataggtaaaaaatacagtatctttcaagtacaataaaatgaggtagcttctatgtccttgtatgtttcatgggactttctatgtgcaccattatgtcttctgtgaataaaggcagtttaacgtctttgacaatttttttgtatagcattgaaaaagtttattttgagttaaaaatgtgtccttgtaaatttcttttctttttttaaaaatttcttctaaaaaaacagggtacatgtgcagaacatgcaagttggttacataggtatacatgtgacatggtggtttgctgcacctattgaccagtcctctaagttcccttccctcaacaggccctgatgtgtgtcattcccctctctgtgtccatgtattctcattgttcaactcccacttacgtgtgagaacatgtggtgtctggttttctgttcctgttttagtttgctgaggatgatagcttccagcttcatccatgtacctgcagaagacattatctcattcctttttatggctgcaaagtattccatggtgtatgtgtgtcacatttcctttatccagtctgtcactgatgggcatatggactggttccatgtctttgctattgtaaatagtgctgcaataaacatatgtgtgcatgtgtctttatagtagaatgatttatatgcctatgtatatatacccagtaatgggattgctgagtcaaatggtatttctggttctagatcctagttatgccttaaacttttattttctgtctaattgctctagctagggcctctagttacaatgctggatagcagtgatgaggtcagataatatagtaattattaaaacttcccatataaagaattcttgatccagatagcttcattaattctctaaatatttaagaaaaaaagatactaatcttatgcaatttatttaagaaaataatggagaaaagaacacttcccagcttgttttatgaggctagcattacttgacatgaaaacctgacaaggacattattagaaaagaaatcatggaccaataatgttatgagcatagacataaaaattcgtaataaaacattagaaaattaaacccagtgatatgcataaagacaaatttaccagggaatgcaaggttagtttcatatttgaaaatcagtagtgcaagtcatcatatttaacagaataaaggagaaaaatcatataatcatctcaatagatgctgaaaagcgtttgaaaaaaaggtaactcctgttcatgattaaatctctcagcaaacttggaatagaagagatatttctcatttgataaaggaaatctataataaacctacagcaaacaacacatataatgatgaaacattaaaacatttctctgtggaatttgatcttacttgcttatactttcattaaatgcatatatgacattttgtaaaatctcagttgctattattgtattattatgacctacatttagttagatgaaaaacacttttctggtacccaacaatttgtcattgccgtttagataccatttaacagtttttctgttgcatctacaagctgggtccacaccagattgggagcacactccaaagcaggacttctctgtttagcttccccctttccatgtttaaaaactttcaactgtcagaaaaatacagggaaaaatgttgtatcatgaaaccaagtaatggttcttctattaactcaaatactaaagtatgactatttgattagggatgctagatgtgagaatggaaataaagggatacaagaggcatttaaaaatagatagttggccggacacagtggctcacgcctgtgatcccagcaccttgggaggccgaggcgggcagatcacgaggtcaggagatcgagaccatcctggctaacacggtgaaaccccgtctctactaaaaatacaaaaaattagcctggcatggtggcgggtggctgtagtcccagctacttgggaggctgaggcaggagaatggcgtgaacctgggaggcagagcttgcagtgagccaagatcgcgccaccacactccagcctgggtgacagagcaagagcttgcagtgagccaagatcgcgccaccacactccagcctgggtgacagagcaagactccatctcaaaaaaaaaaaaaaaaaagatagttctggaattctgagtgtacacagaagataaaggatggagataggatgaataaagaataggagattttgtacatgttattttcttttctgagattagtcttgcctcttgtctttgactagtcaattcctcctcatcttgtttttaatcaacttttttgagataatggtagattgacatgcagttgcaagaaataatacagagagatactctgtatcttttactcagtttgccccaacggtgatatcttgcaaaactataatacaatatcacaatcagaatattgacattgatacagtcatgataaatagcattttcatcactacaagaatccttcattttgtgcttttacagccatgatgacttccctcctgaccccattccctgcttagcccctggcaactactattcctataattatgtgatttcaagattgttatataaatgaaatgatgtagtataatatgtattgaaggtagatagagtgattcctcccacttcataattaattttttcaaatatatttagcaattctaatttttctcctcatatgaattttagaataatctatatatacaaaatattttgctgagatattttataggaattttgttaaacttgtaatgtcaattatgggagaatttacatgttttttatgtagtatcttcgaatccatgaacacaatatgtatcctcatttacttacatcttctttgatttttttttattatactttaagttttagggtacatgtgcacattgtgcaggttagttacatatgtatacatgtgccatgctggtgcactgcacccactaactcgtcatctagcattaggtatatctcccaatgctatccctcccccctccccccaccccacaagggtccccagagtgtgatattccccttcctgtgtccatgtgatctcattgttcaattcccacctatgagtgagaatatgcggtgtttgatcttctttgatttatttcatcagtgttttatagttttcagtatacaagttagaactattgttatatttattatacctaaatatttttattttttgagtgattataagtgttactgttttcaattttggtgttcacatatatattgctagtatatagaaacacaatttattttgtatgtttatcttgtatcttgcaaccttactgaactcacttattagttctatgcactttttttatagattctttgggcttttctaaacagaaaaacctgtcatctggaagtagggactgttttctttctttctttgcagtcagtctaccatttatttcgttttcttgtcttcttggactggctagaacttccagtactatattgaataaaagcagtgagagcagaaatgcttgccttgtttctgagaatagtgaggaagcattcagtcttttatcatcatgtgtaatgttagctgtaggttttttgtagatactcttcatcaaactgaagttctcctctatgcctgtgtttctgagagtttttatcaggggtaagtattgaattttggcaaatactttttctatatcctgtgtagttttccaaacttggaaactcttctgcactctagctgccttcacatgggcaagtgttttcatatcattctgtgttcctctgtatgctttgccagaaaggagttcaccttaaattttaagacaatgttgtggatagagaaaagaaaaactttctgtgtcatggaaaagaggtcagaatttgggccaagattttactcctggctcttttatcaggccaggattttactcctggctccttctatcctttgcatagtgagatcatattctctttgagtctgtttcttcatttacaaatagaagaaaaatagctgcagtgatgatcaggtgacttgatagaggaaatgcttagtcaatgtaattggtttatagatagtaattaatgtgagagttttccccagatttttatagtcttcctttatcatttattgctttaccacaataagtcatttgtcaaggaggaacacgtatatttccctagagaacacaccgatatgagaacatacgaagcctacactcctcattcaggaacaggcaagagacaagtgtacatctagttccaccaagaaaacacacacacacattaacataccagtaatagtaagaaagcttttatggagattctgaaacatctattagaccttgaaagataacttagtatttacatgggaggagacacacttcaacctaccacgttaaaaaagatcccctgagttgtatcctgagctgtcgtagataagtgtcttcacccctctgttactagcctgtgttcagtctagtaaaaagcctgcaatgagaaaggaacaatgacttctttggaaagagaaaagtgtatatgttttggggtgggattaagagaaacagagaaaccaaatgttcctatgggaagctggaacttactcagcattcacttgagaggaaggacaacaagcccctgtgcaaacccctaggaaatgtcagtagagtcaatttctgaaaaatagataaacagcttggtaaagtaagctaaagaataatagtgatacatcccagattttccaggatatttctgattgaaattgtccaattcatttttggtgatgttttaatttttgatttgggaaacacgaacactatacttctatgtttagctttagtgatttttctgccacaagcaatactctagactttagttgagtttttccctcttaattaaataattcttatttgaatatatttatgtttattttaaaaaaggctactgagtacgagattaccacttgttacgatcttgctccttggagcagaacgtgacatctcatatgtatatatacttagctctcttgggcaaaagcttctccctttgttccacatggtcatctgaacattccgtgaagcatttctatcctcccaggatgttttatttcttgttttcatgggtgaagagagactgttttataaaagttttcaaatacttactggatttgtatcctaaagggagaaagcagcaggtcattttttttttctttcaagggcttgctgtaagttggtcttcctcttaacacgaagaaaagaatgacattcttcatgaccgccattgtgagtaggctgtattacattaaagccccattattagcaggctgtgccttggctgattttatagagagctcaggaacagaagtgtagaacaaaaacactgatatttttcactggcacaaactgcagatactttacttgttgattaatttgttaaaatgtgtggcagaacatttagttatcaggtagtcattctgagtaaactagagtcctatgctcctttaacaatggaaaaattatattttcctttttctaatatcccagtgttgtatgtatgctcatttatgttcttggtttaacaggaacattgaacattccctcactttgaatctactctaactcctgtgtttgtgtattttcaccacagtaagccataatatataaaatagtacaattaagaaaaccttagccagcacggtggctcttgcctataatcccagtactttgggaggctgaggcaggtggatcacttgaggtcaggagttccagaccagctttcccaacatgcggaaaccccgtctctactaaaaatacaaaaatgagctgggcgtggtggcagttacctgtaatcccagctactcaggaggctaaggctggagaattgattgaacctggaggcggaggttgcagtgagccgagattgtgccattgtgccattacactccagcctgggtgacaagagcaaaactctttctcaaaaaaaaaaaaaaaaaaacttaagtaatcttcataagtaaatgatatatacttaaatacaaattatcacatttataaaagaaattttctgtatttgtccaacatcggtcaaattccttaatcttataacaattgacacaagaacaagaactgccacccagtccacatttatcttctctatcatatttaagatattgcagggctggagtatcttcttaggatatactttcatcacaacagataacctattacatcagagattcaaagaagtagaatgggagagagaaggagttatattttttttaccctaaatgatgtcatcaagtcactatgctaatggagattgctgcacttgagattatgtgccttacaaaataatttaataatgactttagacagctgatatttcccatatagaaaataagaattcagcttatttatattctggaaagaaccatatctgctgcttagagtgaagcagacctgcagtttacacaacagttgagaataatcttgtttaccaagctctttggataaatagaaaaatatccaccttatcttgagttgctgtggtaatcagctgaattagtttactacttaagctctctggaagatgattggtgcatcatctgtgaagatgactggaatgttagcccactgaagttataacttgtggaacactgttcaaattaccgaaaagagtaaatcaactatctgctggtactcagttctcagggagcagtttacaccttgaaaaatcagatccaacacatactaaccatagtttctcatgttatgatttctggtggaattcctttagactcagccttattcttcaagatactgaatttttgggaaccctaagtacagtttctccttcttacatagagacttgatgttcctaactggtcgcaaacttgggttcatcagaagaatctgctccccttgtgagcacaaataatatctcagtgaagagaaagacactgtcatagaagagtcaacatttatggaatttcctggaatccacagttatcttaaactctgttccactttctctggacaccagctaccttcaatagtgccaggttcagtgtctaaccatggagtatctcatagttggactgggtgagtgcagatgcagttgcatgagattttgaaacatcacattataaaaaaaaattttcaggtatgcaaaaggcaggagagaacatgtactccttaccctgctttaaaaatttctcaacattttgccaattttgtgtcatctattccccccaatcataacattttttgctgaaatattgtaaagcaaatccaaaacattatttcattttacctataaatacttcaataatttacatgggtttttaatggcttgctatttattttcagggtttcttttagtatctttgacctctgtcacagctcatcttgcaaggttgcctatctcattgtcagagagctctagctaaagctcattcatcgttttgtgaactatgaggccacatattctgtgttgacccaagttgggccagaaagacagttttcaagagggcatggcttctaggtctctgccgcagcttgtccactttctttcattgtcagctactagaactatggcagcccatgctgggatataatttttcattgggcacagaaaaagagggtggcgttaggcagaatcaaaagtaggagctaagaaaatgaaaaagacaaggcagaaaatatgccaaaggtgcatatttaagggataaggggaggaatctgtgatgttgaggatgagtccccttgaagtaggggtgcacacaagagtctcccaacttgtgaattactaaggacaccaatggtgaactaatttataatagttgtctcctgtgactgagaaggctgagagtggggattatcagtaagaaaatagctcagaggcaaccaagttgtatggatctttagaaagggaagcaaggaaatagacaaaggacaacttcactgaaaacatttatgaagtattcagtaatgttttaacttctttttaatgagaaacagcaaaccctaaggggaaacactctggggtgtttatgtccagggtcagcaaggctccagggttatgtcttattcagacatattcaggagtaccggggagagagaatactccaggaaataggtgttggcatctgtggaaaggagagaaagtcagactgtatcctagagtcttagggataaatatagagtggaaaacatgaaatcatcttgtgaacacagggcagctattgaggcttggcaggtaggttggggttattgtgaaaaagttcccagcaatccaaagagatgttttatctttgacattgtgccgcctgtgccttgagttagaaaggtacacacacgtgtgagttaagaaaaacttctgatactaaattatttatagttaaacctctagtaaaaccctgaattcaaaaatatttgtagcagaatacaaatattctttttgttttgtcatttatcctggtaaaagtcaagttgctgcagcgtgatggttctggtactgaaatggtcttaggaaagtggaggaggagtggagttacatgtttttaaaaacttgttttgtggctgcatagtattccatggtgtaggatgaagctggaaaccatcattctcagcaaactatcgcaaggacaaaaaaccaaacaccgcatgttctcactcataggtgggaattgaacaatgagaacacttggacacaggaaggggaacatcacacaccggggcctgttgtggggtgggggtaggggggagggatagcattaggagatatacctaatgtaaatgacgagttaatgggtgcagcacaccaacatggtgcatgtatacatatgtaacaaacctacacgttgtgcacatgtaccctagaacttaaagtataataaacatatatatatatatatatatatatatacatatataaacttgttttgtgaattttgaaatagttttacacatacataggcattgcgataatgctacggacagttcccacagtccctgttacctagtgtccatcatggaaagcatataacgtaatcatagcacaattatcaaaaccaggaaatcaacattggtaaatgctattaactaaaccatagatcttttccagatttcagtagttcttacatgcaatcattttcctttatagcatatggttcactgaaactttatcacatgtatagatttgtgtaaccaccactacaatcagaatggagatctcttcaatcatcccaaaggaactctttggtgcagtccctttgtaatcttgtcctttccccaacctaatgcctggcagccactaatctccatcattaaaaatttgtcatttcaagaatgttatatgaatagaataataactatgcaaccttttgagattgactttttttcccattcagcgtaacacctgagatttatctaagttgtgtgtttcagttgctgagtaagattctattttatggatgtaacacagattgtgtatccattcatgtgtgttgaagggcatttgggtttttttcccccaatttggggctattactgaaattatattttactgttttttcctaaatatatgaatctgaaagtgtatctgtatcatttaagacttaactccatgtggaattaatttctagaagcgtgaagaacaggttaccagttctcccaggattgctatgatgactaatttttagctgaataaaatatgaatatatctattcatttttatatgtgtcaagaatgtgctgagagttataggaaaacagaaaggtaataattgttaccaaatcatgaggagtgcccaagttctaaaaaacccacaaagtcaaagaatggtgcatggctatagtttcagaattattttctcagagagtgccagagccaatcttcttggtacctgagggtaaacacccaacctcttgttcctcacttagactttcttctatacttggcttttctccatgaagggtactgtttcagcacattggacagaaaaatacaagcacagtgcaaaaataggtgtgaatgttgtactgattcaggtaccagtatgtgttttgaaagttaactctgcttttctagtgatacttactttggataaaacctaggtcaagcctgttcaaaactgttacccgaaggcaattattcaacattataagcacatggtttccagatcattcatcattttatttaacttcttgagtacataaagtttttatcccatttgtgagtcttgatgcacacaattgactaactgtgtttgggttattttctcttccacattgggaaaaactatctttcatgatctatctcccttttcaaagctgttaaacttttgtcttctttaaatgattttctgtgatgatccagtgtttcttgtcacgtttctgtacctatatgtgctactgttgtgtatttgtttgttcatcctgcctctcccacggaaagacctgtcttctgttcttcgtcaccaagactctctacacagtaagggctccatctgttttgactgttgacctactgaagggacatgcctttgcggacagattcaacacaaggttgaggattaaacccaggcttattttccttcggattttctcaacaatccttccatctcctagtagtatctattctcttctagcaactttttttttaaataataaaattgccttggtcttctaggaccctctgggaaggtaggtgtcaggatggaaagtaggttggtctgatcaagggagtcctgtcatgggaggtgagaagacctgggatctggtactggatttgcttctcactcctaacatgatcatgaaaatattttctgcttccttccttattagcaaaatcaggtagatataaaaggctctgaagcagactgggttgttgtaatggcaaagggggaacctaaaaaattctggactgagatgtgggagtcacaccattgtccactgcagacataccaaacaagccaccttaatttagagcacaggcttgtgagtctagtgatgctgttcaatcatacattttaatctctataaaatgtaatctcctatgcacaaaggtagtaccaatagcacttgagtgcctcgaagagagttttgcccaaaaagcagcagacttactgtatgatatgtccatctgtgaaggtcctggctcagactgagctgacagtatggaagtctactctaatgcagaaaggttggaaacctgtaattattgttaaaagtttagggttgtggaacctatttttatagcaagacaaacttgctctggtattggcccatggatgggtaaaagaaagtaaatgctttcaccttttaaaaaggggaaagtgtggcactgtcagcatggctcagtgctcactgtcatcctgctgctacatcatgtgcttgatgcactgtcatttgggtgataacatcacatttaagtcatgatcatttattcccagtgtcagagtgaaggagtcctgttcatttgagtttcagtattcctcaaactggatttcaaaaagaatttcttccaaaagaattcatcaaggactaccgtaatttcataccaggaagaaaactgtcaaaatatgtcatgagtccaactaaaaacctagctcaaaccatcatagtctctcatccaaactactaaattgacttcctaactaggttcctgcattgactcttgctcctccatagtcggtgctccacacaacagccagagggatcttttaaaattaaaattctgttgaaaatataatacccatcacaaagcctttggcagttttctcttagaagtgcatgcttttacttagcttcaagcaatagtatcttctacctgtaggtcttctctctccatatataagtccttcctatcttttcaaatccagattttacattcgaatatccttcaggagatgtttaatgatccccccagctgataaaagttaccttctctgagttttttatgacacagtatttgtatattttatgccatgtatcagttttctaccttgtatcatagtaatttacgtaccttcatcctttctctactttgaatttattgaggacagattctgtgttttacaaatctgcattgggtactcaataaatatttgtgaaataactaaataaatgagctgtgttaaaattaaaaaaaaaaagaaaaagaagtgcatgcaataaaaatggcttgctatggctcacaggaaccaagtgtgatctggcctgagtcagtcttttcaacttcccctcctgccactctcccctttgctggctttcctccaagtacactggggtttttacttttctttggatcttcctcagggcctttgcacttgtggttgcctctactgggcacttcatattcccccagatttttgcctgactcccctacttcatttatgatcaacatgtaatcactccctcattctttccttattctctatcccttaccatgctttatttttcttcatgacccttatatatcttagatcataatatatatttatttgttggcttatttcctgccttcctgtctagagtgtaaccttcttgagagcagtgacattgtctttttcatactgcatcccatgcctgtagtgtctggcacagaacaggtttttgattaatagtctttgaatgggtgaaagagaatagaggtatctggcatagtcgggggtcaagtcagcctgaggtcaaatccaaatcttgtagattcgggatattaatcatttgttagatacatagtttgcaaatattttctccaattctgtaggttgtctcctcactctattgattatttctgttgctttgcagaagctttttatttaaattaagtcccagttgtctgcaaggaacttagacaagaacaacaacaaaaaacaatcccattaaaagggggctttaaagtacacgaacagacatttctcaaaagaagatatgcaagttgtcaacaaacatgaaaaaatgcacaccatcagtaatcagagacatgcaaattaaaaccacaatgcaataccattttataccagtcagaatagttattattaaaaagtcacacacacaaaaaaacccaacagatgttgatgaggatgcagaaaaaacagaaccattatacattgttggtgggaaggtaaattagtacaacccctatggaaaacagtgtggagatttctcaaagagccaaaaatagaactactattcaatccagtaatcccaccaccagatatctacacaaaagaaaacaaatcattttattaaaaaagagatacctgtactcatatatttatcacagtactattcacaatagcaaagtcatggcatcagcacctaagtgtccatcatggaggactggataaggaaagtgtggcatatataccacagaatacaactcaaccgcaaaacagaatgaaatcatgtcttttgcatcaacaggtatgaacctggaggccattatcctaagtgaaagaactcagaaacagaaagtcaagtatcacgttctcacttatgagtgagagataaacaatgggtgtacatagacaagatggaaataatgcactctgaggaccccaaaagcacagaggatgggaggggtttgaggtttgaaaaattacatagtatgtacagtgttcgctattcaggcaatggtcacactaaaagcccagactcaccactacacagtatatcaatggaacaaaactgtacttgtacctcttaaatatattttaaaaatccatactttggccgggtgcggtggctcacgcctgtaatcccagcacggaggccaaggcaggcggatcatgatgtcaggagatcgacaccatcctggctaacatggtgaaaccccgtctctactaaaaatacaaaaaattagctgggcatgatggtgggtgcctgtagtcccagctactcgggaggctgaggcaggagaatggtgtgaacccaggaggtggagcttgcagtgagccgagatcatgccaccacactccagcctgggcgacagagcaagactccgtctcaaaaaaaaaaaaaaaaaaaaaaaaaaaattcatactttactagtgggcgattattggaatatgaagcatttcagtttaactttgtaagctttagtctttgtgttttaaaatgtgtctgatgctgtcttcttcatagtttgttaggagcactaaatgaatagtagaaagcctgccagaaagtgatttagtctgaatctataaagctgtttctgagcactgactgtaaagtgcactagaagctcaaatttttaggttttgtcattttgtgacaggttgatgtggaactcgaggggttggccaaagccctcagagggttgtaggccatgaaagttcgagaaccactgggccatgtccatgcaaaatgaaaaatagttaaattgaaaaacagatgtccttgtgcctcctaattcccagcaggggctcttgtctgaagcctgagatggctccttgggtttctgtgaatgttgtcaagggcgccaaggatgccggacttgcatttagatgcccaagcctctgtgctggaaatgatgggaaaaaataggaactcttgaacttgagcaagtattagaatatgtgaggtaatggagaagcctcctccctcatgcccatgctcttgtcaggcctgtttgttaaggtccaggccccacttcccactttttttatattattattatactttaagttttagggtacatgtgcacaacgagcaggtttgttacatatgtatacatgtgccatgttggtgtgctgcacccgttaacttgtcatttagcattaggtatatctcctaatgctattcctccccctccccctaccccacaacagtccctggtgtgtgatgttccccttcctgtgtccatgtgctctcattgttcaattcccacctatgagtgggaacatgcggtgtttggttttttgtccttgcgatagtttgctgagaatgatggtttccagcttcatccatgtccctacaaaggacatgaactcatcattttttatggctgcatagtaacagcaggttctggagaggatgtggagaaataggaacacttttacactgttggtggggctgtaaactagttcaaccattgtggaagtcggtgtggcaattcctcagggatctagaactagaaatacacgtatgtttattgtggcactattcacaatagcgaagacttggaacccacttcccacttttgtttcctttaattgcccttatgagaccacatccaaaatcccaagtcctgccaagtgaatgcagtacttaaagatttgactactggatgtctggtcttggagaaaacagtcaagagctggagcaagacagagagcagcatacctgtaatacagcttattaaaataatgcaaacacttctgtaatatgtatgaggtgccaggtagtctgccaagaacttttcatctattaatttgtttagtctttacaactgttcactccacttcctgttagggagatagctgttgttggacccaatgtagagatgaggaaacactgaggaccagagagtaggcatccaaggtcacagagttgggcatgcgtggggcagagccccaggctcaggcattctggatcccaggcccatgtgcctgcatggtagagggggagctggcactagcccttgtgcccccaaatatcctggctgcattgttcccctgttcttagttcatttgtgttactataaaggaatacctgaagctgggtaatttataaagaaaagaggtttatttggcttggaggtctgcaggctatacaagaagcgtggcgccacatcatctgcttctgatgagggccttaggaagcttccacccatggcagaaggaaaaaggaacagatattacatggtgaaacaggaaggaagacagagcgggggagatgccaggctctttttaacagccaggttggcagggggtgtgtggggagactcttgtgggaactaatagagtgaaaactcagtcattaccttgaggatagcaccaagccattcatgagggatccacccctatgacccagatacattccaccaggccccacctctaacattggagattaaatttcaacataaggtatggaggggacaaatatccaaactctattatccccataaatggttaaactccgggagagacaactatgcacctctcaatcccaaggtgagttgggattcacgattggttaaaacttcatcagaaccatccacattggaaatcacatctaaaacttgagtaattttatggtttacaaagcatattgacttccttgatttattcatgttgccagctgccctccgaggcagaggatcttttcacttttctcctattactcaatgccactactgagcctctgcactgaccctacggcttcctgtcgtactctctgcaatgctacatgtcccttctagtctagggcgatcctggtggaagcatgaagccagccagcctctctctggtcaccaccatcacttcattccttatatataccaggcatgggaatgtttcttttgcttgttaatttttgttcttgctcttatctgcatttatcttccttcccccaagtgtactgccagaccctggagaacagggaggggaattgtttttcctttattattctttcctcagttcctgctgtagaactgtacatctagtcaatgcttaataaatgctggtaagttgaattatcaacactgaacgtagaaatgcactgttgcctggcttgttagttttgtaagaatagggataataatagtagcaactaatgtgtacagatttgactatgtgacattatttaagggctttgcacacattaatccatttaatcctctccatgacctaaagcactgctatgctgaagtgcattttgcctatggagaaatgactggtttttgggaagccaatgtgcagaaggccttgtttcactacccctaaaacagtgcatgtgcaggaggactgttattgctgtgctttggaaggtctgtggatgaggaaatgtagaattgcagatttatgggttggaagttgatttagaagacacatgtaacagaagtaacaatcttatcagacttaccagtgtcttccacttatttccttaacttcagatgctcaggaacgacagcacctgcagaatgcatccactgctgaaaaatgagagctgtttcttgttggtactcttcagggacattttagcatagtggtggactccagtgttgacttttcttttcatcatctgtttgatcttggtggattcttaagaatctctggacctgagtttgttcatctgttgattggggttcatggtagccacttctcaaggttatgattgaggtgaaatgagatgctatgtgtgcaaaggacctggtagcaagaatgacatgggaaggagggcttgctcaataaacattgcctgttatagtgtgctggcattaccttaaaatccttaataagctgtaagttttggatgagagtcagaagtgttgggttggtgaagcattttgctacagattgcaggcttttctccggtgtcacaaggcattgaaaacgcttgttcggagacagcccagaagggaaaaaaaaaaaaattctggaaagcctggcattttgtgctatgttgtgagtaagacatttatagttattgagccaaaatttccactgtaatagaaaaagcagttgcttttaaacttctggtccaatttagtaattatgggtgagttaaaatgtaggccatttgaattggatttggaggatcaagtaagattctgtcctacagtggggatgactcatagaggaggtagcttgacatagtggaaatagaagctgataaggagccaggagacccaagttcctgtcctggatttgcacaaataaactgtaatagcctttaggcaaattattaaacatctcagttttctattatataaaatgagagggctgtgtttgtgaatggatctttcaacatgcttaaggttataccaaacagatcactgaaaatgaaatatgttatctacagtcattagggaataaagtattcttgctagtgcaatatacttatttggagaggattacaacataaacaagaaccaacgagaatacatcagtgccagaatgatacagacataagcagacacctgaggctctctgatacccgcaggtcattgctatgtcctaggaaaacatagccatgctagttataagagttttctgatgatgagtctttataaacagaggatttactgggaactagagatggaatttttaaatgatttccatgttatggatgacctgtacttgggcttatgatagctctgccacatcttgagaaataatttattgactaaactcgagttggcaaatgtaaaaactcatttgggttagctagcttgtttacttgttcttggcattctttcttcttcttatttcagttgtaggcatgaagccacattttgggctgatcatctttataataggcttatggttttataacatcagattttgaatgatagcattttctgctctctgtgtttcctatcacctgtagaattaagataggtcaaatatggaacagatggattgaatgattccctagaattattcactgacattataagggtgcctcctgtggcacaaatagaaatatttctgagagttgtaaaaattaaatttttaaaaatcgaatccaatttttctattgacctgcgttagaatttctgagacattctatcttcatttctgattgattttcaattagcaaaggttcctgccattttaactttaaatttcttagttcccctttttcctccaagtggttaatgatctgtgaacaaatattggagcaaatcagagatgcttcagtgtacagtcaccctatagatatttctggtgtgcaagggagtgagctacctgggagatgaggaaccttggttctagtgttttctctgccaccacagaggtatgcatctttgaataaggtctttttgcctgtttcaggcaccattctctcatttgtaaattatgagctccattgatcctatctggcttcaatattctaccgacaattgagtgggaaaaggaaactttctctgaatcataatctctcaacttttcttttcataaattttcttaaagtggattatacctatctgtaagtggataacagcctccatttattatccttatttttatttggctttttttttgacttgcaaattcctttttggatggattagattgaaaatctttgggaggctcaatcagcccagacagatttattcattctttattctggatgaagaagaggaaatagtttaagatagatctgacatggaacattaatttgattgaagcctttctgtgtgaggagtaattgtagcatcttcattgtcataatggagagattagcatggattagattagcttgtgtacaaaggttgtacaaattgattgctgtgatttgtaggctgggctgatctttatagtcactggcatgacttcttaagcattatagtcatgatttctttcatgtggtttacatgtggcaacaagaaaagcacatttccctcgttaccaaaaccttgtgtctcccaatgggaacttgacatagactcaaaaacataagacgtgtacatataatattaaggagatggcactggtcatctggcctgctgtctgggatgacagcacacattggccaaagacagaagagttcccaaaacagatgttcagagaagatggctagaatactgttgaaatgtggtctagaataattatgaacataagcctaaaaaggtagccaagatatggctctgaattatagccagtcatgggattattatttaactccagtttagtatgtttcctgccaagtatgtgccagaccctctgaaacagaatctggtttttgccagcagtgcttagcaactctatattttaagtctaaattccaaaaaaaaaaggaagagtaaagaatactaaactgctttctgatgggagtaagttgtatttcaagtggcctcagaaatctttttctctagaggagactttctgtggctaagaggaagagagtgggcacttctcccctccactgaacccacctggacttggtctctctcccaaggctttcactgcaattgaaaggctttttcactgccctaggtctctctcctaaggctttcactgcaattggtacatgtgttcagtgactattagaacttaaatgatcactctcatcccacctcactgatctcattttccaaatttctccctcttgctctcccattctagggaatctggccttcttcttggtcttcagatgcactgaacatcttcctgcttgaggatgtttgctgccttaccttactctgctggaaagcaattccttccaatggtgcaggtctcacttccttacttccttcagattttcgctcagataccatgttattcatgaggcttccctggccaccccatttaaaagcagcaccccaccagcattgcctatcacccccaccctgctctgtattacctgataacactaatgaccgtctggcagattatatctttatttgcatatttattatctgtattctgtctttagaatgaagacagaggctttattccagtgactgaaacaatgcctgacatgtaatggaactcaataaataattgttgaaataatgaatgaataaatgattagcctttaatttgtattcattcgtacacattacattggggttttctagaagacagtatgaaaatttcacttaatttgtgactcaagtacagaaagaacgatagagatcagaggttcttaaacaactatccatgaacccaacgctgtgctttacaaaatttaacgtgcatgtgaatcgacagaggatctcgttaaaatgtgaactgtgatttagtagtctaaattggggtctcgggttctgtgtgtccgacaggctcacatacgatgcggatgttgctggttctaagattgcactttgaggagaaagactctaaagtacctgtggaagggattcaaggggttcacaaagccagggttatgaatgtccagtatcattgttatagcaaagaactgaagtgctagtttctagaaatttctggtttatgcaataccaatgaacagatcatttattggacattcattgcagagctttcaactgttaactatgcatggttgttctgtatgcagacataaatataggtataggagaatttctttttctgaggaaataatagaaaatattcatcagtttgtcaaaaggatcagtccaaacaatggtgacagccattgttaatggatgatggcattaaacaaaagaaactttaggtatcaaaccaaaacacatcataaccacatcgtaaaagtagtgacaaaaccaacacatatgtttgcaaataccttgggaagattgtgttttatagcaatagtttttttgctaaacaaacaactaacttttaaagttaacatttgctggagatgatattttcccagggaagtatttaaatgcttggaacacacctatccaaagacaaatatttgttttcccccagccactggaaagagaccccaactggaaacattgtctagaaatgaatatttggaaactctgaggccctctataaatgccattgcagtagctcactgtccttctaagctgaggccaaaatgccctcaaaggggccttggtgtagaaaagctgttttcaggcaaaaaaaaaaaaaaacaaaaaacacaacagcccatcaagagctgcatagcttttcagtcaggaaacttacccccaggtggatgtttctcagccaaggagtgtgggcaatttagtttcaaaagtaatttggaacaactgagatgttttatattaaatggtcctactaaatagacatctagcacagggcttagccaaattctagaaggcctcgcatggtatggtatcacgatcctcataattgctaaaaatattactcataatcataatggctaacaattattgagtctaaatatatgctaggcaaggtgctactaaccttccatacattttcttatacaatatttataaaactaattcggatggtactataagtttttttgttttgcagaaaaggaaactaatgcatggatatgtgatttatattgctcaaggtgacaaaattgttgagttgtagaattgggactcaaattcagatatgctgattccggggctcatcctgctaatgactgtgctgtactcataatcataacaaattgatttttggtgaccttgaaaccctgcttaggaaactaaattttaagattttggttgaatttaccctcagggtggagaaaacacaggttttcataaacttactgtcatcaaattaactatcctatattatttttcagaataaacactcactacttgttaaggaaatcatggtgaaacttattcatatgagctaagagcttctgcattcccatttcatggaaacgtggattttccacgtgtggctctgtagcatggcaaaatagcttggtgtgcaaaaataccctagggtaaagataaatgtaattgtttttgaaatcaaccacttgtccctaatgctcaatctgtgcttctgagaatttgccgagtttcaatgctttaatgtgtgtattgaacagggctttctgttgcaaatagcagaatttgcacacgctagttgaatcagaaaacaataacgtaacaacagatactaataaacacgtagaatctcggagagtgccaaagagcagggttctggggctacacagccacaccttaggacttctctctaatcatatgacttctcagcacctgtgatgccaggacttggcctcccaaagctgaggaaccaaatgcctcaccaactgctcctgccagaaaactggttctccctggtttggtgcccatactctttgaattttctggctttaaaaattggactcatggtgtgagaaaattccaaaatgtaggaagatcttcaaagatgttgagcagtcaccacgaggaagcttccaatgttgtgtatttcagatcagtgttgtggagtatctttccctttatcacacttttccttcatttttactccctttgattgctaaatctttacagagagcagggactctgttcattcagtccccagaatggcaatgtgttaagtccacaagaaggcttttcgtggacttttggagtctgatcataaaggagaaatatgtcttaaaaaggcagtggaggtgatgtggtgaattttgtgcttagcatttttaacttgagaaaaatgataagacaggccagtcaacacacaatgggcaaatggagataggtgactgtaattcagaagtgcacacaggactccaggtttgagtatgggagttgtccttcaaggattggcagttgaagcattcaccagagcatggatgtgttttctgagcaagagctgtcaataattaggatagaaaactgaacgtggaaccctgaagacctctcaccctgtgccaaagtccaggtgcagaaaagaaaggtgagcttgtgataaagagcaggcagagttcagaagacagccatattattttggtgtcataggggttaaaggaggcaattcatgagaattgattgcttttttctcactctttattgagatatagcttctcaaatgtaaagcatgatttgaaagagatcagtaacaacagttatgcattacatttgaggtgtgttttgtacttttcaaatttgttttcaaatccccatcacttcatttaacttcattcagacacttaaattgaaaattactttctatgtgtggttaaaaaaatcttgcattatttttgtttttttctttaatctaacttaaacatggaagaaaattcagttgtgtgtagttaatcacaggtttgaagaaattaccttaattctattttgagaaagaaagagtatcatgtggtatacagagtgaaggcttggatacctccgttgcacaagtttcctgcttagctgggacctggtcaggccacttcacctcccatttaaaacatcctttagaactaggtatggagctaatgttttagatatgaaaaataattattcacagcgtgttactataaaacatatgttcatagattcttacatttgtatacaaaacaagaaatcacaaagctttattcatgcagaaaaaattaatttgaaaaagcccactgtatgccaagaaatattcttgatgcttggaggtttggggttgaggtagcaatggggagataaaatgaatatggcttgcttcttgctttctgcaaagaattgagtttcgattctgacttaagagacataaacaaggaaaagtacattctccatgctgcatatgtgtggcttaggccctggcttgatgaagggagatttggtattttgttaatgtaggaaaaactaaaccaaagtgtcttttctattctctcatttaacagtagtcaacacagaagacttctgtgacctctagtcaccaagaagtgtgtggggatttctcactaccaacaaataaaccatcagttctgcagctgacactagctgggtgtcctctaattcaatgctactctgacactgtctacctggagatacagtcagatccctcagcttgagagctcagtccctaagactgtttcctcccctcactgcagatgccagtcacaagctccagtttgttgcgtctgtgcttccagccagctggctataaattggggttccctcaacttcccccttgggtttgattaagttggtagagtgattcacataactcaggaaaacacttacttacatttaccatttaccagtttattatacagaatattgtaaagaatacagatgaagaaatgtgtaaggtaaggcatgggtggtgggggacagagcttctatgcccttcctgggtgggccgtcctccaggaaactctgtatattctgttacccagaagctctctgaacccaatccttttgggtttttacagaggcttcattatataggtgtgattgattaaaccatcggaccctggtaatcaacttaactttcagcctctctccatccccagaggttgtggggtgaggttgaaagttccaaacctctaatcatgatttggtctatccagtgaccagcccccatcctgaagctacccaagactggcagccagcagtcaactcattggcatacaaaatacatagtttggaggctccactgattttcagtgtggtaccccaggaaagtggatgaagaccaaacatgtatttcatgaagccttctatttcagtagtaagaaaaatactaaattataatacgaatttttttataccagcaaagcagttgcatttgcatctttaaaatgcaagtgcaacttctttttagagatctattgcattttaaagatgcatttcatcacttattacagccaaatgacttgcccaggcattagattttctgttgcagtgatagcagggatttaaataatgattatcttctctttgacctggtgaatttcttattaccctgcatatagacatggttggattgtactgactttgcaaataccacacaactgaagttggatttctgttgtccttcaatcaaccatctacctaagcctcaaaccgttttgttttgcttaaaaacagaatgagtttggcaaacctagaaaagtacacaaaggatcatccatggatataggatggaagatgtatgaatatggaccaacaacagtgtttattttaataattctaatattgttataagttgtcataagcttattttcgtaattagagaatagtcttcaatttacactgaatgcatgtttggcaaatatactaatgttatatatgtacttctcttgttcagggcagtcacttgttttaagtaacatgtttatctttattaaaatatgaatttcatgcggttttacagcaaggttattggttaaatcaatattctcaattaatgaaactagtgacatcatcatcaagagcaatagctagcatttgttgaatcctgactatgtgtcaggcattattttaatcacttcatatattttaactcatttaatcttcacaatggctctactatatagaaacatgtattaacccaattttgccagagggttgagacacagagattttagggaacttaggcaaagttacatagctagaaattacagtcagtgattgcaaagcttgtgctcttaacttctattttatcttgtatctgtaaagatatttactaaccaagttaagtgtccttagagcatatttttatagtataaaaattgggaaaaaattaagataaagaaaaaaacccataatcctactgctgaatgagagctctgttaacattttgaggtacacatatttaggctttttccctcctttacatacattcacataatttgtattataaatgctcttttaaattaattttattcaattaatatattttaaaactttccccatggtattatttcattattattttaaatggctacattaagatatggatatttaggcttgaaataagtttaaacaaacctattgtcttcttaaatctccagtcatatttccatgaaggatggcagctcttagaagtcatggaagcaaagaacagtacccctcaggaccattgtaagaaaatgtcttctttgagagttcttaagactattagcacatctgaggacattttcctaaggattcatcttggtgtaaggacacactggggatattttaatttgtagtgatttgttgttgttgagcaataaacagtatatacctcttgaatttgctaaggaatgtgtgagcatacagtgctggtaacactacattagttaactctctttacctttcaaaactgatttaatgaaggtattttaatgccgtttcatagataagaaaatgaagtgcaaagtagttaacttgactaacaacaagtaagtgaaggagacataatttaagctttagcacagacaatctgtctcttatagtgaggcagtataacaataaatatgtggaggagatttctaaaatttccagtgtatgttaagaaaacaatgtattttatgatgttttagagaactgcccattataaccaactgataatgaaattcttcatctttccatgctatcatatttttcccttgtcagcacactgacctaggaatcaagaaattttggttctaatactcgcatttccacctttctgggtctcaagtttttatctttaacataaaaggttagaaaacttgaaaatcttaaagtctcttcttggttcagagagattagctttatggagttgtagagcctgtgtagaagctttataaagtggtttagagtcaattgacctcattggagaaaaaaagtagtcagtaagttcttcacctctgcaaagtgcagactgaatgtggagaacagaattgttgttttcttagctgtggctgtagcaggctgttactgattaccctcataagatgttttgaatttgtcttggaggaggtggctttcagcctgactttcaggctggctttgggtcatcctgagtaagaacaagactggtagtatatgctgccaaatgtaaaattatataactgcccaggagagctgtcacacgtggaggatactagaggctgccatgacaatattagccaaaaaatgataaaccacaacgtgatagaaggaagaatcctcactttatagttgagccccgagtaagtgaggaaagttgtgcaagtttgtaacttcagtgtgatggttgaggatggaattaaagtctcctgactgcttatgaaacctcccacctatatgtttttacgcaaaatgtcatggcccttacatccttttgtttccattgctatgatggttctggattgtaatcctataagaatatgatcacttaatgaatttatgttcattatatttcatatgcagcctgaaatgcctctggtttctttattagcaaatcaacagaaaacacttgataaccagattcaagattagacagcaaagatctacagaaacagattaatatcattttatggcatactatgatctttttttagggaattaactaattactgctcaaggaagcatatccaataatatgcgggtaaaaggatataagcaaaaaggtagcagtaaatagctgtgttttggattccacaaggcttgtgttaggtgaggtcttattcagcatagttatgatgtggtaaagagagtacattgcccactaatacacatttcaggcattataaattgggaaacttgcaaatgcaaataagaaaggatgggtaaaatcaatatgcttagtgaagaagggatcttaagaaatttttttagaaaggatatgggaccctaaaactattgaagtaacaagaaattaggacaagaaactaatatgggaccctaaaactattgaagtaacaagaaattaggacaagaaactaacagtgatagaggaagggtactggcttgttagatttgggctcaccgtttggcaatccatctctaaaccctatcacaacttatttataataataatcttggtgctgatcatcataatctgggtatgcagatttacctacataattttaggcaaattggttaacccctctggacatttaattcctcatctgtgaaggagttacacaagaatacatttattggtttaaataactactgttcaatagagaatttttaaattagcatctgtagctctgttaggagggaaaaatgatgatgttttatgatttcaacacatgacttcatttctttgagctatgtgacagtcatgctttcctccattattcatcaatactccccactgcttaaagttgcaaatatctagggctgggctacacaaagggaactgagagatagcccacccttccgtgcaaattttattgataagagtgatgtggtccagagacatgagacaccttgtccaggggtggttaatggtggagcctgaaggatgagcaggtcatgattctcagcacagaactctttttctcttgtagaaaagatagcaaataggctggatgaggtggctcacacctgtaatcccagcactttgggaggctgaggtgggcggatcacttgaggtcaggagttgagaccagcctggccaacatggtgaaaccctgtccctactataatagaaaaattagccaggcatggtggcatgtgcctgtagtcccagctaccgggaaggctgaggcgcaagaatccattgagcctgggaggtggaggttgcagtgagctgagatcacatcactgcactccagctgggtgggagagtgaaactgtgccaaaaaaaaaaaaaaagaaagaaaaaaagaagagatagtgagatagtaaataggttttcctcctcatgccaactcagatcagttgatagtacctgccagttgagaaaatttgtaaggacgtagtacctaggtactacataaaacactattgctattaataaataattatcactatcagtaattattcattagtactgtctgctatattaacaccatagggaaatagaaaatgtttgccacctcctatcaagaatattctttaaacatattccttcaagataaacgttcaatatttattctgcctttcttgtatctctgtcactcacaatattacctaatgctatctaatgtattctgttcttagagaagtaaaatgtctcagtagaccaaacttagatttgatcattacgaaagatgtcattctcagtggctggatcttcatgaggttttcttgagctgtttttcatttcacctgctgctggatgttttaggctgctgtattcacatctggtggcctgtctcactaggatctcatggctgcccgggcagtgtcacagctctgagttcaggttggctctagtcttgcccttcgctacagaatcgtggaatacagtgggagatgaagaaggcagcactcttgccctttgtgtttctagtaacttaaattcaactcctggcagcctacttcacattctgatttgggcttctgatgttgagtgctgagggaagctttctcccactgcttacatgttctagctccttggttggctccaaggagttgtgatggaatttcttggcatacttcaagccagcagcagccaggttggccttttccctccacatcttatagctttgtaggattttgggagaaaactgacctggaactagttacatgacctttttcatttatttgggtcttagtgctcatccttgtcacctcttattatttagaatgaaaagcacattactctttaaggaactagagtataaattcagaaacctagaacacatatattaatacacagaactttttctcttttcctagctgttcaaatgtaatacagttttatgttcaaactaaatgaatgcctatttattcctggaagtaaattttgttattttctagtccaggctctttgttttacacatgacaaaatagaagcccagtacacaggagggttgaatgacttgtttaatggcacatggccaaagaaacagaacagaaaaaaagaaatcagaatttgtcagttttctgtctagtgcattccaaatcacatgacacaaccattattggttttagaattggaaaagtttggtttattttttaactgactactcagattttaaaaaaattgtttcattaatagattagtaaaaatttaatactgctgttcattgtagggcttagtaagccattactatgatagatctttatttttgttttctttaagtctgtactggacattgaagtctctctatggtctctggacttacgtcttggccttacagactgtcctgtttcacctttgcctcagtctttgcagtaatctccctcactgagaagtctggaacatgccacatgttcacagtgaggctgttaaaacttccagccccatccaaaacctagacttggaaaccattgtcgcattgctttctgagtccacagatagcaaatgtgacaagtcaaaaatgatgcctaatgttgagcaaggagtctttaaaaagccctactcatgtttctaattctcacacccatgtaattcacaggcatctgtccacaggtagtttgagaacctaactatattaaatttcaatattcagcaaatagctcataaccaatcatatctgaattagaaaagcatgtgtaaagaacaatagcaccaactagcactcatagcagattattccagctatgttataataaggcccttggcaataactcaaggtctgttttttcaaaatgtaaggattaggtgttcttgaggcaggaaagaaaaacaagactattctttgcagatggagaaaaaaatgaagtagattcactagcagagtcactttcatggaaatttggagctctgctgcacagttttagtgtttaaacaggattggaagtcctttgggatgacattttcaatgctgaaagagaaacacctgatagaattgagtctcaatgaaacagaaaacctgctgaattgaaaaggggcttcactcagtgactaattttctaaagtgagtaccccaaactgttaataactattttaaagcagttggatgactacattcaagataaaaaattatatgggaataaaaattgtcaatatatctgattttggtaaaactaagcacacaatttaaatttatcttggaaaaccttagtagttattggaattacttgagaatctattgcaagcaatctaaatgaattcttccaaaacatgtcactggagcaggtactcaagaagtaatctgaagtaaacaaacaaaaacaaagctatatttatccttcctcttttctgtgtaatataatccatgggaagacaagaagaaatttattttctacttgtgagatttggggatgatgatgctttttctatccttatcaccatttgtcaagatacaactttcattactttccagtaccacctttgaacagcatcttcttttttagtatattctcccttcctccttccatctctccattctttcttccctcctcttttcttcccatatttccttccttccttctttctttcattttctctctctttggaatctcttctcttaactttatgttttccccaagtgatcagctgtttttatacttctctgctggttcctcctaacagagtctttgcagattttaaagtaaaaccataaagaagaaaacataaatagaatcttcagtgatttcacagcagaaaggcatggtttgtattactttctctcagaggtatttttaatggggtaaatatttatttccagatgacccaaatctctttgttatgtttgctgacagaaacagcagctcctccttctttctctctacagtaatgagattatggacagggatagaccttcttcatactgctctgacaacagacattttataaaccagggacgggctatttcaattcagtttaattcaaaaaaataattattggatacttaccacatctaggatattgttagctgttataaatgatacaaagataattaaaacattgttcttcctctcaaggaatttgtaatctagtatgagggaaactgtgtaaataaatatccaatcctggatgactgccacaacataaaaacacacaaatgtttaggaactcggtagacaagcaaaggaagtagaatagtaaagatgaatgtctcctatttgtcaatattttacttcacctctgtgttgttttgggatatatcaaataatgtcttttaaatttagagttattgttactttataataattattattattgtcataggtagtgttaggttgtgtcatttatgtaaatacttatggagtagtaacatgatatagtagtctacctcagaaagagatttattgagtctatgatgctgaattatagttttgtaatatgtttctaaattctttatgatggagtcccactctatcacccaggctggagtgcagcagcacaatctcagctccctgcaacctctgcctcctggattcaagcgattctcctccctcagcctctcaagtagctgagattacagtcatgcgacaccacaggcagctaatttttgtatttttagtagaggtggagtttcaccatgttggccaggctggtctcaaattcctgacctcaagtgatacgcctgccttagcctcccaaagtgctgggattacaggtatgagccacggtgcccagcctgtaatatatttcattccaacttttagatagcttctttatcaggtgctgcaataaattgtttgccctagatcgaggtggggagagagccctcttaggatgagctgtcacacagtaaaagataagatttcctggatcagttttctaaagtgacaggcgtgtcccctaatcgagacagacagtgctccattttgacaaataggccagacttctacgtgtgcatatttgttttgtgtgtgtcagagtgagggtgaggttgaggagtcattctgttcttattggaagtgaatcaggcataaaagtgatagagcgcttgaatgagatgattgcagttgaaagacacagcaattaagcagatttcagactttagagagcatgtcttccgggagctatccacggtactgaactgcttctccctatattgtcctgtaaccccgcaaaacaaaccttcaaacattttaaaaccacaagacattttaaaaactggctttggttattccttactagacaaattctctaacctgtgtatttctaatacttgttatttgtttaatcttggctaggtcagcccatttttttttgtttgatattacacattcatccatttatttattcaacaaatatgtaggtacaatcttccgtatgttgggcagcctcctagtggttaaggtgcttaggtttcttattatgtaatgctaattattattacttttgatttttctgggatttactctaaggaagcagatttaatgattaaaataattctacttcgtgtgtgttgtttgaagaacttggtttctggcccaaagatgatgctttgtttacagtacctagaacagccctttggcgtatcgtagacactcaagaaattgtattcacagcataaacatgtttattgttgtggagtgattttctatgaaatgttacaaggaaaatatatattttaaaccaacaagtaatctttgcaaaaaaaattttgaataagaaaaatattgttctaagtaatctagatggagcatacacctagccttaaagagtctagaattgacatgttgggacattctcatatgttaagaccacattacaggttgaccagaaaactaggaagaaatagaccagatacttcctgctcaggcttttatgtgcatatagaagctcagtgatctttttattctgttttactcaggctattctgtattcaggtaggatatctatcacccttactcttctctaaccccatcttaaaaaacaaagcggcggggagtttttcttttgatatcagcaacagataaccaaataagatggcgtataatcttttttttttttttttttttttttttttttttttttgagatggagtctcgctctgtcaccgaggctggagtgtggtggcactatctcagctcactgcaagctccgcctcctgggtccacaccattctcccgccttagcctcccaagtagctgggacgacaggctcccgccaccacaccaggctaattttgtttctgtatttttagtagagatgggggtttcaccgtgttagccaggatggtcttgatctcctgaccctgtgatctgcctgcctcagcctcccaaagtactgggattacaggcgtgagccactgcgcccggccagaaggtggagtgctattcttaactgtccttttgtagttctttgttctaagaatttggaaagacaagttagtcctgacttccatggaaatgttttttttccaaccaacatgggtgtaattctgaaggagaattctttcttaccagtgactcagtccctctgcagggcacagaatcaacagtattcctagtgtttgcaagatcagtgattatatagggtcagtataggcaaactctccatttccaatccgttgttaatgaaatgttatttttggtgaagttctgagatagactgaatctgagcagaataaaaaaaagtggaatcagcctgagttctagcttctacccctatttctgtgatatgcttccttattgacatgtgggctttgaaacttggtaacatccaaattgtattatcactctcttgaaaatgtcattgttccatgaaattgtgagacttaaccatttttattgatatctcagagaaaccaaatcttgagaactaagagcattggaggataagctcctttcctagagatacttactctacttttggtcatggaccaaatttggagttattcctgtggatttttttctcttgttccttaaggcagtgatagatgcttgtttagtcaccataagttgtgagaatatgtggtctcaataaagacccagcaataccttgtttttctactcattatccagccccaaagtttaagatctaaatgtttcctggtgagaatacaaagaaaagtgagctcttatagcctgttgatgggaatgtaaattagtgcagccattatggaaaatagtagagaggcttctcaaaaggctaaaaatagaactaccatatgatccaacaattgcactattgggtatttatccaaaggaaacaaattcaggatattgaagagatgtctcctatttattacagcactattatttatttatttattgcagcactgtatatttatttattgcagcactatttatttattgttaacactatttatggcagcactattcacaatagccaagatatagaatccacctaggtgtgcaagcatgaatgaataaagaaaatgtatgtatacagaatggcttactattcagccaccaaaaggaatgaaattctgtcattcacagcaatatggatgagtctggagggtatcatgttaagtgaaataagtagggcatagaaggataaatactgcatgtccttacttatatgtgagagctaacaaaagttgagctcatagtagtagagagtagaattgtggttattagaggctgtgagggggagggggaagaaaggagagggaacggttggttaaggaaaggagaggagaggttaagaggttggtgcagggttatagctgggcaagaagaatactttctagtgttatgtggcactgtagggttaaatacagctggagatgatttatttatattttcaaagatctgggggagaaggttttcaatattcgcaacacagagaaatgatgaatgtttgaggtgatagatacggtgattaccctgatttgatcattatgcattacatacatgtattgaaatatcactctgtatactataagtatgaataattatcatgtgtcaactaaaaataagagggaaaagtttcaaaacaatatctatttgttgattccatctgtatggcttagtgataatgtaatcttttgctgtcttgcattgttcccatactggatttcatgactaatatctttgcctttgactgatttgaataaaaatatgttaaatgaacagagaatcttgacctcctttcagaggctgaaggattccttaatttctttcctccatttgcttaggaatcagtgccattgactgtttgcttttagttaatacggttttgtttgcttaatacagaatatgtgcaatttaagtgtcatatgtacataataagatgtaatcttttaattatatgatatagcataattatttccattttatatatgacaaagttaatgtttaagaaagttaaataactctaattaggagtcaggattgagaatccagacacagatggctctgacatcagaatcactgctttaaaccactcttcttttctgcttgctttaatattcctttacttcctccataaagtgccacatcagaatatagaacaggttattaatggaagaaatatttcaatattttgagttttttgggtgaatgaaaattatagaattaaaagctgaacatcattttatttggcagtttcatcattatgatttaaaataaatgcagtttttgaagtttcctaatttattctcttgaaatatatttggattgccacatgctgtatattctaacacttggccctggtagggtttatttgtatatgtgtgggtgtactttaaatataaagatctcactgattttaacacacattggaaatatgcataggcaaaccccaaacaactttttattcaatagtgtccatgtatctctaaacttttgatagaaatttgttccaataatggggttactacataagttgaagaaagtcaaactgaagcaaaatttgaaggcttctatattaatgatcagttttaggcgatacttgccaaaatctagttcaggattagaataggctgtgttgacattttaagtgagacatatcagttactctttttcagaaagttaaaataaattctcataatgaaaaaataaatgataattttagattcttttagagaatttactacctttacaaattaggaaaataatattcacagtatccatgattccaaccagttaacatgttggtatatttctttcagttatacacatacacataattaacatataattatatgaatttatatataattttgcattctaactttctatttgacataataacagtcttattttgcacttttatgattttccaatgagatatatctattagccatttctattttttgagttgcctgtttttttgtgtatgcatagatatatgtacgcctgtatatatacacgtatgcatacatatatatgttttttgttttataaaaagagataccatatttctattaataccgtcacagctctgatccttctttctattgtagagcttctatgcatgtattaaaatttaatttagaaccaatcaaggaagaggtcaatctgaataagataatatttgtaaagttcttgcctgtattatgtatagcaactagagctactttatccacagcgatttgaagccatgttgaacctatacaggttaattgatgcaattctcttggaaacatcgtcatctgttggcctataatgttttaaaaaccttggaacagtctcattgttttaagtatatctcctagttttttcctttaatttgtttgatgatatttttattttcttaagatcatcttcagctgaatcctgacaaccctactacatgatcataacaaaaaaagcaatgaggagtctctataccctttattttcataggaaaatattctaatatccacaaatgtgattaaaggatagagcaggtggtggggcgaggtaacatctgatgtgagaacgaagaagcaaacagttgttatttttactctggtcaggtgaaaacaagcagtcattacatgtctaaatcttgggtatctttggaatcattttcagccaccgtagtaagttgtacgtgcttgagtgtttttaaagcatgtcttatagtgaccaaatgtttctaccgcatttatctcagtaaagttgacaggattctattaggacgatcttcacctaatgagataaatattctaattgtaatcatcctcttggaatgcatatctcttctgggaattaaaagtgctttaagtggtgttgctaaacaaacatttctaaagagtaatcataaagttaaatgcctcacaatagcacaataggctttttagttgacctggtttttaatacttttttcattgcaaaatttcttattctggaaagtttggaaaaatgaggaaaaaaatagaaagaaaaatgtcgaatttaaacattttgtcactacctagttaaaatcggggataacattgtgatttagatttctccagtctcctttctttttttttttttttttttttgagatggagtctcgctccatctcccaggctggagtgcagtggtgcgatctcggttcactgcaagctccaccttccaggttcacgccattcacctgcctcagcctcccaagtagctgggactacaggcacctgacaccacgcccgccaatttttttgtattttttttttttagtagagacggggtttcaccgtgttagccaggatggtctcgatctcctgacctcgtgatccacctgcctcggcctcccaaagtgctggggttacaagtgtgagccaccgttcccggcctctccagtgtcctatctcaattcttattcaattgtttgttaactagattggaatcatactgtgcatattgttttataatttgctgttttggctgacatttggaaaaattattttagaaaaaacagccagttttgtagatgaaatggtgttttgtttctattgatttttgatttttaagttgctattacttcatgaagttagcgtctttcttgtgtattggctattctcttttcttttgctataaattgtctgctacatcttttagttcataataattattgagtcattttctgtttaaatataaagtatttttctcatttgtcgctgtaacataatccatttttaagaagcagagcattttcttgacagagttttgaaatattgtgtgactttatggctagaacacagaaacattagttagaatttcagaatcatttgatcagctctggctttgagcctctgattctacttgtagtctccaaaccaatctttggtatccttctgtagagatgtaagttgttatcaccaactcaacatgaaattgtaagaatttataacagtgttttctaaaatgatttctttgatttattcaaagaaatattatctctgataatatatttcagtatttttcatattgctcaatatcagacgaaagttcttataaaagtcctgattgtttcagcagtgatttgcatgccattagcaggtcattcatccccttccactttgaggctcaagttctacactagatttgatttgttggagggagtctacaaactctgctttcactagaaagacatgatctgtgtgctttgctgccatagtgggcctatccacatggctcattctctgtaacactaacttccaggaaagctcttgtatcaaaattcatcaccggtattaaacagtgtcaattatttttatcacctgttgaaagcttaaatgccaacagaaatttgtgcttcacagggcattgggtcctccatttatatttttcaaatgtgtagtatactcttgcttttagtcgtctattacccagtgttcttttcggaaaatatttttaaagttaattatatactcacagataatagtgcaagcaagtttcctccatgttctgctttcctttttctgactttacttcatgctacattccttcacaaatagtaataagaatttatttctactcagaatgaatgttcctcacagtggagagaatttgccactacaaaatgccttctactctgtgtttaaattcctcgtacatacaagcaggttttgggtgttacatttgttcatagaggtatgaaattgagagtcatagattgaaatgttttttatagtagagactcccaaaaaaaggcacagaaaaatggttgatatctagtaggagttatttacatgctgctatttctgatgcttcctatttgtttcttctgaaaaagtcgcccttcctatgtctcaaaacagtacacctgtaaaaccacatcctactgggcataattctacaactgcttctattctcaatgcttgtgttgcatgcttttggaccctaagagaaatcagcaagctataaacccaggaccaagaagagcatatatctcttggaaaaatagcatttgagtgattgaataaaacaggctgttttggggatcattccaaatgcagggaacaatatggatctgtgatacttgagttgttggactttgtagaatatcaaagatgttctgcttttcatattcagatttttaaatagaaggaaataaacaatttttaaaatgtttggaattaaatgggggaggtcatctgtaactgtctttgttgatttttgtgggcatcatagcacagaagagttctcctggcttagcattctggtattgctcacatatcacctatatgctaatttgagagcgttcatgagtgccatgaaggatgagtcagaatgatagacagtatgctgactttttctcctcttattgaatttagtctgatctgctagtgagagaaataaaagggaaataaagcagggagtataatagggaaacctattttctccaaatgttgagatatttaaaaagtctttgttcagtgtacctgcagttataatctttccagagattcatgagatgtcagggctaggcaagactttagaattctatgtagtaaactcttgtttggggctgggaaaatggagggtcacagttagaataattgcctaaagccacaccgacagagagctggtagtggaatccctgttttctattcaccttcctactcagttgcactacaagtttatcctaattcaagtaagcttagacatcaccttgggtaactttctgatttaccaaatccactagtggaccatattgaatttgcttccaacatgaatactcttcatttctctccatccacactgctacccaccaaaatcccatgccttgaatgtaaataatcttagagctgatctgtttgcttctgtaacttcctgctactcattccataagcaacagaagaggcaaaatgaccttttaaaaagtataatttgatcattattctcctttacttaaaatcctagaatgacttccattgcacttaaaattccaaatttctttccatggcctaaagggtctacttgatcagtgtatcgcctttctctagaacttaatctacctctgacccttgtgtgctatgctgcagccactttggcctcctttcttttccccaaaattgaagacacatttccatctcagggcctaagtgtttgcagttagctctgtttggtgttctcttctcctagctgtttacagctttcagccttctgcagagatgttccccagctaccctgccgaatatcgcctttccccacccaatcctttcattaccctattttttcatagcagtaactactaattaattatgtctttatctattgtcttttcccagtctccaactagattgcaaagtccctgagggcagaggtcttgatgtcttttccattaacaatatctcgagtaaccaccagcaatctgcacatagtaataacctgaatattcctttaatgaatgaataaactgaaaaccctaaagttcagtaatactggcctctgtgtagagtttcagaaatatgccaaatatgctttcaagcatcccagcctgtctagtgtatcctttgctctcttggccttctgagatcacttttaattggcatcctctgaagttgttactctcagtcatgctggttgataccccgaatggataggaaatggataggcattttttctgtccatctctaaacatctctgattgggcctaatatacctctcaggcctgctcctctggccaggacccctctttttatgggaagtagggagacccaggaacacagaacctataatatattagaacctgttatatatctctctagaaaaaacagttattttaaggaacgtgattgctggggatggcaagtcagaagcctgtagggggaggcctgcaggctggaaactcaggtagcagttgatgctgctgttttgaagctgacttttttcttctatggaaagcctcagttattgctcttaaggcctgccaagcaatcggatgaggcacacccacattgaagattatctcctttacttgtggtcaactgattatagatgctaaccacatctaaaaaatgccttcatagcaacaccttgattagtgtatgattaaataatgggacatgatagcctagccaagttgatagaaaactacccatcccatcatgcatttgtggtattggagaaaggaaatgcttctccattgttactactgggactgttactgctgagacacaccgaagaggagaatttttagtttttagtttgctttttagcagaattcaaacttaaatataaaattaaccaaattgtcagaaaggactgaaggttatcctttcaattctgagttttttatgtaaaattattttattattagcaacaggttttgaaaacatttatcaattatattcttatatattggtgactttaggtaatgaataaatctggatttatctttctttataataaaaatatggtctgatcaaagtatataaaattgaaataaatattgtcttatttgtgctttaaattaattgtagtataatattaataggatattatataatattcagtcattttagaataggagaaacattttagggtaggataaacaagaccgtatcatgaaattggagattttaattgttttgtaatattaaattttacctctcatgaaaatagagtagataattattatggattatgaaacagcataattagttgtaacagttttaccttgaagaaaatatatcttttttataagcagaaaacttcattttgttttctttaaaatgaagtgaataccggccgggcgcggtggctcacgtctgtaatcccagcactttgggaggccgaggtgggcagatcatgaggtcaggagatggagaccatcctggcttacacggtgaaacgccgtgtctactaaaaatacaaaaagttagccaggtgtggtggcgggtgcctgtagtcccagccactcgggagtctgaggcaggagaatggcatgaaccctggaggcggagcttgcagtgagccgagattgcgccagggcactccagcctgggcaaccgagcgggactccgtctcaaaaaaaaaaaaaaaaaaagatgaagcgaataccatctctactctcaatgtatcgtggacgataataactatgctagtatttctgcatagtattcttaaagaattctgactgaaaatatttaaatgaaatacacataatcactttgccacctaatgcccatcaatcattgccaacattgacttttaataaagacacataaccagagatgatttttaaaaattatggataaattacattagaaaatttagctggagcaaattatatttgattattattaacctgccataatttatattcattaaattgccaaatcttgattataatagtcaaaaagaaaaggtacatgataatgatctagaggtagaacacatgctatcaactggaaaactaattgttcagcatcctaagtgtatttgttgcttaattatatatataatttctacaacaagtggaatgatttacatgaatgtcaaataactggtttataaatgaaacctgatattaagctaaataaaatattggcatatagtgttcacttatgagctaatattcttacctctagcttcatttacaaattaattatgctacaaatatattaatgttccacaactctttcacacttccatcaatatcgagtttattccattacaatgtgaaattaaaaaaaactgtagaataattacttctgcttcagaaaatatagattacctatcttccagtaagatgctgcaatttatttagataactgcatttattgcattgattttgaaaaattgctcaacctaataccctttcttctttgctaattcctggggaaaaggaatccttttcattttgatccaaatgaccattaatcatattataaagtgtaataattaaccctttttttaagtgtcagagacacatgaatagtgattttatttggtttcaataatcaagtaaattaagtgataaaatggaggccataattaagtgatcttgttttctaataagaccaacccattaatgtgcatgtaaagatgcctgtcatcaatttaacagctttctgagtttaatatacattaagagttttatttttggaacaacttagtaatttttagaaacttgagtacaagtgttggcaaaggttctataaaattctgtctacagaatatgtggaacacaaccttgggtcgtatctccaaggaaaactaccatgattaaaaagacaatgctttgtcaaattcacttgttatcacaatctaattgtgttaaatgccggccacattctgagtagacactttaacttggcttcccttgggaaataggaaatgaagggcccgaaagaactagaagctgcctctcaattttctttcaacatggcaaaagcatttgcatttatctgtgcccctctcttggctacactctcagctttgatacactacttgagcatgtggaggtttacctactgaatgtgacccttatatgaataatatgagacttttgtatcaacagtagtgatggtttttgtttttaagtcacattttattgtatgtcttctctacctctcactatatgacaagtttagtgaaggcagggtctgtggctatcttgtttattattgttttatatcctgggggtatcacagtgcttgatcatagaaagggctcactaaatatttatggaaggaaagagaggaaagaagggagagtgaaagaaaaaacattcaatgttctcactcttaaaccaagaaaataattgtttactttatttcattgtagtaagaaaactgaacatgctactaccttcaataaatttttaagtctgcaatacagtattgttgaccataggaacaatattgtatagtggatttctagcatttgtctttcttaactgtaattttgtgcccgttgtttagtaactctaaattttcctcttcactcagaccctggcttccccccattccacaatttgattctgtgaatttgaatattttcatagaaaacattttatgagtagaattatgcagtatttgtttttctgtgactaacttatttcacttagcacaatgacctccaggttcatccatgttgttgtatatttcagaatttccttcttttttaaggctcaagagtattcgcgtgtgtgtgtgtgtgtgtgtgtgtgtgtatcacattttctttattcatctgttgatgaacatttagtttttttcacagtcttggctattgtgaatactgctgcaatggacatggatttttaagcgataaagaataaagctcttttcatcttttaactggaattattttttagaaaatattttgttccaattttatgatttttttgctattctttcatgattaaaagttatgtttcattattatcaggttgtatatttacatatatattttgtctgatgttaataatggcatgtttactttctttgtgtaagctgatgtatggaaaatattttcctagcttttatttcacattatttcatcttttgtttcaatcattcatcttgtatattttggcttccttcttcccttttactcaacttagaattttagagtgagtaacttttaagataaaacgagtttaacagataatttagcccattcacatttgttgtaattcatgatatttgtgtgtgtttgttatctcttcatttttgaattattttgctttttaatacatcttttctccatttcttctgcattaccttccttctttattattaattgaggttttttgtgctgttcttcttccatcttttttaaactaatgaattacaaaatttgcttctttttatgatttgtctcatagttattgttaaagttttgagacctgtgagtaaaaatattttatattaatacctagacttataaatcagtactaatatcttgtcttgaacaggacttcatccctagaatactttttatttctacatcatctgcttttaaataatcagatattaaatccagattgccatcgtttcatttttaaactttgcagcagagatttttttagatgtgaacataaggtgtctattttctttgcttcttgttattttgtgttgtctttctctttcttgggtaattttttgttttgttttgttgaatcagtaagcttttcagaaaatgcctgtaggtgttaaatttctgagcagttatatatctgaaaatatctttgctcttacatttggttaatactttggctagatttagaatttaaaattatgaaatgtttttctacagacttgtgaagacattcaatatttgtttcagcacatggccttagaaatgggatatctataccaatctaattcccatgtttctgtaagtaatatacctgtttttatcttctctgagatattttggaatttgctcattattcttggagttttgaaatgtcatcaaaatatgtctaagtgctggtcttgtttagtaatcttgtatacctcaggggaaatttcagtctaaagatgtatatcttttccttcagttttttttttctctctctctctccatatatatatatacacacacacacatatatatacacgtatatatacgtgtatatatatgtgtgtgtgtgtatatatatatactttttatgtcttattagacaaacgttaggatttctgtttctgttctctgtcttaacttttttatgctctccaggccatcatgtgcttgtcctataatctggaccaaacccaaggtacacatttgtagctcacaaattcttcactagtcaccatctctgacttatcctaaatgaaattttattttatttttaaagtgattatattttaaatgtttctttttataaaatgccaaccagtttttcttaatggctgtaatgtattgaatcccttaagctagttcattattcctatttcaagatttttttctactccttctattaattgtttttttttttttttttttttgagaactagttttgtgttgtttgcattggagtagcatatacaagccattgtttctgacccgagtgctctcttttagaattttttttttttttagggtcagatcccctcatctagtacctctgcctttaaccgcagtctcatgaatccaactgctattcagcaccttcgactcagatgtctgataggcctgtcaatcttgggagacccctagctgaacttccacagaaggatgggtctgctccttccctagtctccccatatcaggagatgatggtacccttcaccctgtagctcatgccaaccttggattcatcctgatacctttcttgtcctacattctacatccaatgtatgaacttgtgctcacttttatgtccaccttcaaacaaataccatatctgactgtctctcaccactccccagctacatccctaatccaagtcaccatcatctttcacttactctattgcagcagcaatagaccaatctgggctctgcttccattcttttcaccctatgtttattatgtattcagcggcctcagagaaatgtaaaacataaatcaagttccatcactccctgcaaacaacaacaataacaccccttataatggctttaagtcctaagcatgaccaatacagccatatgacatcaaggtcctgcttacttctctgactttctgttctataatttctataatgtctatcattgttcactgtgtttcagtcatattggtcttcttgctattttggggagtatgttcccacctcagggcctttgcacagctgtttcctcacctagtagctctttctctagatattacttggcttcctccctccctttaattgtttctcacacaaaatgcacctcctcagaaaaggattgctctcatccagttatcatccactgtccctctttatcccttttccctgccctttttcttaataacatgtaacgctgcctggtgtgaccaagataggtttgtttgtgtttgttgttgttcttcaaaatagaaacatgaccagggtatgggactgatgacttctccaccagcatatcctctgagggtgctgaatcatttctgttacatagtgggtgcagaggaaatatttgttacatgaggctatatatcaaagggcttcatgaaggttttgctttactgtgaatctggagtcagataattcttttctttatttctcctctgttttctttgtagagatcatgaatatcttaagctttatggtgcctctctctctatagtttggctatgagcctccccgaggcagatggttaactttatttagaaagagggtttcaggactttattctagtgataaataccgtggctgctagtcatagaataaacaagggcatgagagaaggcagccaactagaccagctgttcacaccatggtcctttcataattatcctggttactgcctcttggctgtgtgtattgcttgactccaagtgtggggtgtcttttgtagagctttatctggagctgttttagggagaatcaatctcacttctagtagatttctcctgtgtaagtgtgggctttgatttcctctacttctatttctactaagcccattacttatattaatcccatctactttcaaccttcaaggacttttatttttcaaatttctgatctgatagttaaaattttccccgatgtgccatgcacttattctaaaatatgatttttttcctggtgtcaataagatttggcgtacagggaaagacagatatatatgacttaaattttgtcttctttgcctctattgtatgttactgtttttatcttctgtgttgttgttgttgcttaacaaatgtagctacacatttatatcttatcactgttttcttaaaaataatttgttttgttcttctcccttttatatttagaaaatatataaaaaatgtggaccatgcctttgatcagaaattattatgaaaattgttgtttagaatgggtttgagggtggaaaagtttattaagagattgtaatttaacgaaagagaggtatgaatattctgagaattgaggtgtcttatgcattaattggattgctagatggccccactgatttcctgtttttcttgttgtgttaatctatatattgaattaagcacctcaaactatgagttattagatctcatatatctatatccctacagcaatttctctaagctctggtcatttctgctactttgtaatctaaaactgcttcataacttcctagatagaaatagaatatgtgggtgctcagagtatcagatagaccccatatataatagctatgaaatttcaggctctataatggattataggatatttttgaaccttggtaggttgtaggattagttgcttaaatacatagtaccatagattgcaaatgtttaaaaatcttgatgctggaatttattagaaaaacaggaatgaatacagtttgagaggctagaaccgtggatttcaaatgctagcctgtatgagggtcccttggagggcttcttaaaatacaagttgctggttgtcattttcagggtttctgatttacgaagtataggatgggcctgagaatttgcatttccattaaattcccaggtgatgtggctgctgctcctgggacaacatttagagaaccgctagattagacagtctcacaacagggatttctagggacagcttaatggttactttatgatttgaagctggaatacccaattaggggtttttccagtctcatttcatttcatttcatttgcttccttttttctttcttccttcctccttcccttcctcctccccttcctcctccttccttttttatctcctctccttgcccatcccctttcctcccttcccatcccctcccatctcttccccttccctcccctcccctcgctgctcctctcttctcctctttctttctttgccatttcaggtgctttatctcttaagcactgcactgctttgggttatccatttaagcttagaaggagagcaacagaaaaggaattgaaatgtaaagcagatatcaagagagcaaaatttgtcattaaattggaactagcaattaatttgtctatttattcatagtctaagtgtgattatcaaaaatgcttgagaatcaatagaaccacatgggtttttcaagttggataggaccactgaagctacctggtggaaacacatcattgtattgatgagaagactgaagcaagaatatgaaaagcatctgaaccaatgttttcttttccacgttctcatcactctctgctacccacagctgcccgtcatggatatactatatgttgtcagctatattttgattacttctctgtatatttatcatcatagtttactaaaattgttagtattataccttttgcatataagaaaggatgaacatttctagttcttaaaatgtaagaataagtgattacatattaccttgaaacagtatggaacactttttactttaaaatatttttttcaatttttgtgggtacatagtaggtgtatgtatgtatggggtacatgtgatactttggtgcaggcatgcactacataataatcattttccagaaaattgggtatcagttgcctcaagcatttatcctttcaattaatgctcttagtctgttggtattaaaacaatttttattttctgatgagaaagttgctgtcactttgatcattgactttgctacaggaattttcttttcttttcttttcttttctttttttttttttttttgttttttgagacaggtctccctctgtcttccaggctggagagcagtggcacaatcatggcttactgcaatctcaacctcctgggatcaagtgactcccctgcctcaaccccctgaccctcactatctgggactacaggtgcacaccaccacgcctggctaaattttgtattttttgtcaagacaaggtttgtcatgttgtccaggctggtctcgaactcctcggctcaagtgatccacctgccttggcctcccagagtgcggggattataggtgtgagccatcatgcctggccaggaattttcttgaatgcttcaataactttattccatttaactctcacaacaatcccatcaaatcaagtatcatgattatgcctcatcattcatttcacaaattaataagcaaagtcttagggggttatcacttcccaaattattacatgccagtgaaaaaccaaagtttgagcttgcacacaaactttgaaacactattcaaaagcagtgttttcagcacctgatctttattgcctcacagagttttatacagatacaaaattatgaaatgtagctggagccaggaactatgacatggaatatacctggcatacacatggtctttgtcttttcctacatctgtgaacttgttgaagctttagatgtcttcccagctcagtgatcatgaagacgtcctcactgatgagtcatctttacttgtcatctctagctacctggaataaaacacccagtgtagtgtctgggatccagtgggcatcgtgggtcagttagttctccagccccggttccttttctggttgcctgagcttggaaaattcataaaatctctttggacctcagttacgcaactgtgaaattgtgctatagggtgacttgaaaccactttgtagattttttgggagagctaaattaggtaatgcatgtaaaagcatttagtgcaaggtctggcacataggatatatttgctaaatattcgtagaatcagatgaataactctcatgaaatattttgttaaacattgtgattgttcactgggaatattatatggctgtgtgtgccactgtccgtgtttcccctaataattaataaatattaaataatttaaaattaaatattaaataatttaaaattaaatattaaataattaataataaatattaataaatacctttggcaagtatatactatgtcttcaaaatgtttcttttccatttaatgttttcatttatctgcaacatttcttaaggcttatttgcatgtgggtaaaattcaggctacaataatagtcaaggaagtatatttctcttgttctgctcccatacaaatggtgcccccctgcaagcctcttctgaattattcctggacacccaaataaaaatggtaatttttctttccttttctcctggattcttattctaacatctgctaggaggatccacaccctgtcctaggctagtagtgtacagaccatggttttgatgtctgtgcaaaaggtacaggtttgtttgcatctcttcaatttttttcattgtatgaaaatataaataatataaaatgtactatttttaagtatacgattcactggtattaaatgcatctataatgttgtggaactatcaccagaatccattgccatagctcctttaatcttacaaaactgaaaagttgaactctttacccattaagcaataactccccattccccctcacttaagccccgggcaccactattctactgtctgtttttatgattttggctattcaaagtacttcatataagcggtatcatgcagtggtatctcatctttttgagactggcttatttcacttagcataatatcctcaaggttcatccatgttatagcatatttcagggtatttttcctttttaagactgaataatcatccatttatagatataccacattttgcttatccattcatccagccacgggtacttgggttgcttccactttttatctatcatgaataatgctataaacatgaatgtacagatatctctttgagtccctgctttcggttcttatgggtatataccccgaagtagattgctgcatcatataataattctgtgtttaaatttttgaggaatcaccatactgttttccacagcatctgtaccattttgcattcccaccaacaatatacaaatgttccaattcttcgcattctcgccaaaatttgttacatgttgttgcaaaagtaattgtggtttttgccattaaaagtagttacttttgcaccagcctagtatttttttttctgagtttttttttcttttgttagtaatgggtgtgagtggtatctcataatttttatttgtatttctatagttgttattgatgttaagcatcttttcatgtgcttaccagtcatttctgtatctcctttggagaagtatctgtgtattcagcgtttgcttattttcacattgaattatcagtattttttgttgttgaattttaggagttctctatatattctggatattaatttattgtcaggtacagatttggctttgatggcactaaagctacttcttcttaccttcgaagtcacagtacctgtaatgattgcttatgtttagcaaattaacatcattaggctttctctgtcattatataaccccttcatcctaagactcacacatgagcacctcaactgaggctggggatgtgtgtccctgttgttgggggaacacatgtccttagctctgactccctttctccagggtcatttctatcctctcttccgatgacggtctaccccacagatcctaagccacatccaagtcacctgaattccagcatgattcttacttagattcttaagtttaaatgcttgtaattccttcttcctttcctctccttattaagtacctttaaggaagtagaaaactctcaacatttagaaacacttacaagcatatgaatttccatattattaatgcctcgtgaccaagatgtcctgacacatttatatggtcctgtaaaagttttataaataatctggagcatattatttctttatatcctcactttgtgaactagacaaggtagatattaaaattccaagtctcaggaagtttgaatgatttttcttaagcttagtcagctaattaggagcagaatcaggactggaatttagggcttctggctccactttatctctgaggcttgtactattctactgggatatcattagaagaaatgccaaatgaatgccattgcctcttcagccctaaacacaaagcccagttaagtgtttccctgacatttttcctgacatctataaaaattcatattttatttttattcacatgctgattgatttagatgttatgaaaattaaataagttccaaaaggcagaagataggctatacacatatttttaaaaatttgtcattgttcaaacaatattgaatataaaattgaaatgtccctcattataaaaaaaaattctctaagagtgactagttataaggttatatcttttggcatgatgcacctctaagcagtgcttgcataaagtctctaccaaagctgacagagcttccctaaggcctaaagaacttggcaaatgttgttgaacaaaaatgacaacaatgaaactgtgtaggaggattctgcattagtgcacctaagaatgttctcgctaatttgagcacttctcaccatggaataatgcttttgttcctctctgtctttttctgctgtctcacagagactcctaacagggctccctggaccaggcttagacatcaatagggatggactagaggcattccatggaggtgacaattacagaagatcagaagtgcctagctacacactctattttcttctagcatctgaaattattgacttgaacccatttgtggggtcactaagccaccttcatataatatttattacatgtgcaaagtcagaacatatggagagcatttgcatttgaatgggggaaacatgctgttagataaattagaaaatctttatatttgcatttttctttatttaaaaaaatcaatctgtggtatagtagagctaggaatattccctttttggttgacttcttcactctgtgtttaaactttctcagcattgaggcatgtgattaaaaggagctattttcctaatacaaacaaaagcattgaacatcctgtgaaacaaaagttgttcattttaacttgcgttatatggaaatgtgacatgttttagatttgtgtaagctcatgtacttgaaaatcagacttgtctaaaatttcttttgtaagatattagagaacttttgaattatacctcttatttttgaatgtacattcctcagagaatcatctttatgcacaaataatgtttattttatatttttaatctactttagcagacccacctgattcttctacatgtaaggttgaaacagttttgagtgataaagaactgattttatggagcaactaatgattttgctgttgctacttttgtgccagcaaatacgtaatccacaagaatgttataagaaagatatttatcaagcctctaaaaaaaaagaaagtaatcaaaagataaggatgcataaatatcttaagactactcatgacatcaaggaaggtgaatcagtattaataattcactagtttgtgcatacttattgtcaggtgctgggtcaaattaaattggaatgatttgttgacatgaggatttctgggttcatgatggattcacattaaaacaatttttatgttttaagccttctcccatcaaataggttttacggtcttgtgtacacattacatgagggaaatagtactttaacattttacatgctggtgtatagtctatatcagcagtccccaacctttttggcaccaggaaccagtatcatggaaggtaattttgccatggagtggggttggggaaaggagatggtttagggatgaaaccgttccacctcagatatcaggcattacattctcataagaagcatgcaacctagatccctcaaatgtgcagttcacaatagggttcgtgctcctatgagaatctaatgctgccactgatttaacaggctgcggagctcaggaggtaatactcgctcacctgctgctcacctcctgctgtgtggcccggtccctaacaagaccattcaccggtaccagtcagtaagctgggagttggggacccgtgttccacatgttataaaaacttaggctgggcgcggtggctcacgcctgtaatcccagcactttgggaggtcgaggggggcagatcacgaggtcaggatatcgagaccatcctggctaacacggtgaaaccctgtctctactaaaaatacaaaaaaatagccgggcgtggtgggcgcctgtagtcccagctactcgggaggctgaggcgagagaatcacttgaactcgggaggcggaggttgcagtgagccgagatcgcgccactgcactccagcccgggcgacagagtgagacttcttctcaaaaacaaaacaaaacaaaaacttaaagagttatttgagccggacacagttgcatagacctgtagtccccagctacttggtgggctgaggcaggaggattgtttgagtccaggagttcgaggttgcagcgagctatgattgtgctacttacactccagcctgggtgacagagcaagtccctgcctctaaaaataaaataaattcggaaagaattatttggtgattcaagtataaaacaaaatctatcagatatttgtgaaaaacatattgttacattgttacatgttttaagaagggaattaaactcctagactctgtatggtataggagttcaacactataggttggtctatacatctaatgttggatatgtattttgtgccttttatttaaaataacatacattttatggcatttcttgctttgcattaattactggccatacccagaatcctttccttcgaataaaataacctcttttcccaaacttttacatattgttcatattttcaaccccctacacagttgttaggtcttgaatttggaagaattaaagggaataacattaatgacagtgaactatgaattaggaacctcaccctatcaatagccaatttccctccttttcagttttgtgtctcagtaatagtccttaaaacaacaaatgatacattaagtgacctgagccaatttcctcttgacatggaactattcaacaaagcctcacataagctaacatttcctaattagccccttaactgttgacttgagaaagggtttgcaatacaggattcttatatattaataaaaactataggtaaaaaattcaagatgttgttgaatctttacagttcgactcattattcaaattcttcatctttacatcaagtttctcatctttacattcctctaattcaggtcatctccacaatatgtccaataaaccgtatttgcaagatatcgggagaaaagcgagtctgcctctaggaattataactgatacttcctttgtgtgatgaacagtgatttttatgtatttagtcatatgctattagggaatagatatctctagatcagagaacagattgtgtattagtcacagaacatcttagcactagttcctccagccctagttcctgtggagtaacgcgatgagggccagatatctatccccatgggcagcagtgttgcaccgcatgagaggaaccctggaattatgaaacttggagcttacacagggcagctgggcacatctgcccttcctcccctccagagatagaaagacttgtatgtattctggcatgtaagcaaatgactctcggggagagtaaaaagatgcctccaggttttatttcatgagcatatggctccagaggagacgcatctctaaacctctcaggaacagttcattgtcttttacttctgagacatactgtccattcagtcattctttagccaaggttgccagtactctttgctaagaaaccccagatcatgcagaaatgtgaacatgttcacagagaattgtctctcaatcaatagtacctagtacattattatacaaagttctggggatgtttggcagggattgaacccatgaactagaattatgagcattggaacttatctaaaccaattagcaaataaaaaagttacacatttcttgagaaaataattttatagattaataattacatgtaggatatgcatatctcaagtcatctgagggtttaatgttttgtatactttatcttacaaaatagattccaattcatgctgtctggatatacaagcattaaggccttccaaaggcaaaatcaggctaggtgtgaaacatgagtggtatacggaggtatagcaagtagtgtcccttgatacccttggggaattggttccaggatgtcccagagataccaaaatccatggatgctctagtctctgatataaaatggcatagtatttgcatgtaatctagcccactttcctgtatactttatatcatctctatattagatataatgcataatacaatgtaactgctatgtaaatagttgttttatttgcattgtttagggaatatgacaagaaaaaagtttgtacatgttcaatacagatgcaatgttttggaatgttttggggcatatttttgaatccacagatgcaaaacccatacatataaagggctgactgtatttaagttcctcattctggtgtgattaattttatctctttttagtatacttgtggttctcaagtcactaatgttttagttataaggtgaaaggcacactgtgtaattgaatgctaaggccaattctttacctctgatgtctggaataagagccagatttcccatccttttatggaactacaagcgtcatggctattagcaatcccagaatagttctactcccactttggctgagtttaagatctttttctaaagacagtaaaaagagcatcagaaaagcatttgtgaggctgaagtacctcacataccaattttgtgggcacatttttggacccttaagttctttttgacagttttataaactcatgcccagagtagtttcctttatttaatatttgtcttaccctctacttacaggaaatgcaaggctcatcagctttttcagggagtagcatgactcagagtctgatgtacttgaaaaaaacacagcgggaatccaaacacacttatgtcatttttatgtgttagagagaaaccaggaagcatgaattctcacttttcttaacgtctttacagtgtcaaagggatatttgtgaaaagaggttgtgggaatcattgttctgaagtgcatccaagattagaagcctggtttatgtgtgctattttgcctcccagtatgagcagcctttttatatttattccaagtattactgtaaactactttttctttatacatacacaatatatctttgtctgtgatcagagcggagcttcatttccactgaccaatagaagggcatttttatttgatttaagtgaaacttggggcataatgcattctttcaaacctctgattggacatgacaaacaaaaagcttgagctagaccatggtcatctgaactatttccaataacttacctttgtaattggagtattgcctcaaatatttccctgaactctaattaccatggatacgatatcactcaacagaactttttcttaggagcactaagagtgtggaagacagaggataaatgttgtagtttcatttgattatctctatgtggatgctcacatttttttttctataaccaaccagtttcattttgatgagagtgtttggagagatggttatgctgacactagcctaggtaagagagtaagtctccctctcttaaaaaaaagtgacaatgtcacttctgctcacagtctgttgatcaaaatgaggcaaacggccaaacctgatgcctataggttgaggaaattgtgtatttgtgaatagtaatagcacagcagccactaggcctcccagtcgtactggagatttctaaaaggcaaagtgtttttagtttgttttaggtaataggttgatatttagcctattaaaaaggcagaccctggcttgacagacaaaaattaataattaatttgggagccagatacagacttaggttttttgaattcttgtttctatattcttattttggaagtttacagtttggttttatatgcaggggtgttagatgaaggtgtattgttttgcaaatagaaacagtctcaggagacaaataacaatggcatgagaaatttatgaagtttatttttagcagcactttcaggcaaggttttgccatcaatattttcattggtacccaagaagccaacagaggaggccatgttttatgaattgatgtggctacaaatattagctctgacattttttaagtgaaaaatggcagaaaagatacagaagcaaataaatatagagtctctgacagccagcagagatggaaccctttctaacaattatgaccaaaggtatgtgtgtgtgtggtagtttggtttatacttgcttgaatgctgtccttgttcttttttttttttttttttttttttggtagttcttgcaccaagtgactgatggcttcctccaaaacaatgtcagcaggacaaggatgtattggcagggtatcttttgaatcagtaaccccatactgatccttgacctaattaacagtctgctataggcatcttgcagtttactgctactgctatcgcaacatcaagaaaatgttgaaacttaagcacccataagaaacttaagggggtgtcccactcaagtcattataaattcagttttattatgctaaaattgtgtgaactatagttcacacaattcaggctggctggaagcctgaatactacattgttttatattataccacatttattggaagagttggtttgcttttaaaggaatccatcactattagtttcatggcgtatttaacatctggtcaggtcagttcaatacttggaaatgttttgatacttgaagtttccagcagattttaacacatgcctttggatgtaagtaaacacctttgtccacaataaataaaatgtaactgagcaaatgaaactgtcacaatgctttgaaaactgtagcatactgaccaaatctatgccatgattttaccttctactgatggaaagaaaagtaactttgattattgcaatctgggcaattcacttatgttatcttatttaactttcatgaaaatcttcatatagtagctatcattattccatttcaaaatgggaacagaagcttaaaaatggaataatttaaagacatacaacctagaagaggcaaagcttctgaatacaacagctatctaactccaaaggtcttggttcttataagaatccattctgttttatgtctgtgattgtaagcttttagcagtttctcttcttctatttctttttttttatattttttattatactttaagttttagggtacatgtgcacaacgtgcaggtttgttacatatgtatacatgtgccatgttggtgtgctgcacccattaactcgtcatttacattaggtatatctcctaatgctatccttcccccctcccccctccccccaccccacaacaggccctggtgtgtgatgttccccttcctgtgtccaagtgttctcactgttcaattcccacctgtgagtgagaacatgcagtgtttggttttttgtccttgcgatagtttgctgagaatgatggtttccagcttcatccatgtccctacaaaggacatgaactcatcattttttatggctgcataggcctagaaaggtgcagaaactgctttcaattcctgaagggacttgtcaggcaaaataaacatactgaaaatagctttgaccatttctaaatcctttcctggatcagagttggaggttgctcctacattcatacgcattgctgatggattctcatcaatggcccctacttctgggttggctgagatcaataaatcttagcagtttataaatggaagaaatggctttacatatcttgtttcctgaatccctttggatattttaaaagaggtgattaaagtaaatttatgtttctgcagatgcatgtaaagctaattgttttaataacagtataattggcgaaaggaagttatgtgtaataagaaacaaagcgtaccacttccaaaatattcacattagacatttgttaaatttgcagtgagtttcagcatacacacatacacaacacagaccatatgtgaacattaggaagattgatttgtttaaaaaatccacttctacaccacataagtaatatttcttactgagagtcactgaagtgaggaagaaaaataaccacataacgggaaaagaaaaacattaaatttagttatattgtatatgttttgtgtttattagtttttattaattgtaggcatgcaggtaaaaaaatcgcctcatttgaaaattaataacccagggcacaaactattaattaaggcatatagcaaatgccttttaaaagtattttatactggctgggcatggtggctccgcctgtaatcccagcactttagaaggccgaggcaggcaatcatgaggtcaagagatggagaccatcctggctaacatggtgaaaccccttctctactaaaaatacaaaaactagccgggtgtggtggcgggcacctgtagtcccagctactcgggaggctgaggcaggagaatggcatgaacccgggaggcgcagcttgcagtgagcggagatcgcaccactgcactccatcctgggtgacagagggagactccatctcaaaaaaaaaaaaaagtattttatacttaagtttttctagctgctagtttaagagagatgagaatacattcaaagagcagggaaaggagagtgtctgaacagaggaatttctaaaaatgagtacagtattaacacagttatccttacaatagcctgaggtcaggactattgttttctccacattttggatgaagggactgagacacagagaagttaagtaacttgtataagatagagaagagacagacatgaaactgttataaaaaggaaagagacaggaaaagaggagaggagagagaaagaacaaagcttggatggcaagttaacttaggtcatctacctttgaaattcaagtagtctgtaacttttgccattacatttagaggcaccctctgtgacacggtcatagaatactggttcactcttaggcattcaacaaatgcctattgagtgtcagtcatttattcaacaaacatttactgaatgtctaattaagtagcagatatagtgctagttacttgagctacattgcggagacagggcctctttgaagagcttgtgcttcctctccatgaatgctagattcatgctttccacctaaaccctacttttggaaatcaagaaaagttcacctccttcatgagacttcttggattaaccccatagtctattttcacctagaaatagaaccctgtttttgagtcatgcacgttgccagctgggataaaaggctacatttcctagtcttatacctaggtgaacccatgggtctcaggtcaatgggatgtaaataggatttgtatgagaattctgggacatcctccaagagagcagattcagctggcaggaaaggaatttgctttctgatatggtttggctgtgtccccacccaaatctctacttgaactgtagctcccgtaattgcaggagggacctggcaggaggtaattgaatcatgggggtgggtctttcctgtgctgttctcgtgatagtaaataagtctcacaagatctgatggttttgcaaaggggagttcccctacacatgctccctctttcctgtcgccatgtaagacatgcctttgctcctccttcgtcttccgccataattgtgaggcctccccagccatgtggaattgtgagtccattaatactcttttctttataaattaccaagtcttgggtatgtcttaattagcagcatgagaatggactaatacactttactacctatcctcctcctggcctggaataacatcactgggtgggtggagtttcagtcactgtcccaggacaggaggtggcctggagaatggaggccagtgcttaggtgtggagtagaagaatataaggggcttgcatccctgatgacctgaaggtcccatttcagccctcaaatagcctctttctggatttatttcatttgagagagaagcagttacatgaagtttgttactttgtttgagagataaatgcagttatattaggtttgttaattttgttttgtttttgttttagttgtatgatgctaaatccaattctaattgatatacctccttcataagataattttataaacccctggaaggaagattgttcattgggctttggcaggcagtgaccttaaaactaggaaaaactgagctttaagggcccatgaaagtccttggcttgtgggtttgctggctctttgctagaattatattttgtttttttctggttcagggtaccgtaacagaaggtgggaagctatatttttcatgaaactgattgcttttctaattaacaatcttgctaataaagcaccactgtacagcagatatagtgtttttaatgtcatggatattgtacctgaaagtaagtgaagaagtgtcagatagtttctgccaatatttgagcagtcttagttctaactgctacaattatgcaaggtatttgtcttagaagagcaatggccatttgagtaagactttccatatggtgttccacagtcactgggagaaaatgggcctttttttttccttagtgaggtgatcctctccttctttctctacaaagtaatgtggagtttggaatgaattctaatgagtgaataataggaagattttgcatactcatttggacaagataaacacaacagcatggttaaaattcttgagatgaaaggctgagtttctgtagcttgaattttagatgataaatatcaagaatctatttgaaggtcagctatcacaaatataatttttctctggcaacacttgggtagctttccttggcaaattttactcaaaaagaagataaattatttctgcctcaactttttcttttacctctcttcttctttctctttattcgattgtttgcctttgaaagtctggctttcattgcatcattagacagaattgtgtgaccattcccaaagagattgacagtgttcatggcaggctgtataggaatctttctgtgtgcaggctggtctacaatttagcataataaagatctggccttatattcataggatctagccaggaaaattagtcttacctcagggtttaaagaaatgagggtgtgtcccagagggatctgtctgtggccagcaggaaatttaattttaaaaactgaagaatatacaatagttcaggcactgaataatttgagcctgcgaaggtgcttctgccacatatattatcatagtgttagtaaggccaggaaggtctgaagtttgtatgagttcacagatattttgaaagactcatgcaggtatttttgatatgattccattttaaaatcacattgtctgtgatgtgtatttatggcattatctaccacatgtgtttgtcctgtagaatttacattacaaaaccttctctgatcaataattgacgatgagtgactgtagtagtttgggaaataacttgctttttactcttttgtcacctgcttcaatatagttcctgctgtttgatgagaattgactgagctggagcctgcaaaagtaactgtagtcaaattagttacattaaagggtcaaaattatagctgcgtggagctaaggtcatggcagaaccaaagagctctgggcacagatcttcctttcatgctcgactgggtccaataatcccccgaggctcaggtctctgattgcatttccagatggtctcctctggtgtaaacaccacccgcgctctgtccaacagcataagctaccctggcagaaagcaaaacagcaggtcagggagccctgggaattacacagtgggtggcacctgttgccaaattttgacctctctcatcccctacgttatatacccatgatattttcaacttacccctttcctttggtatttgcagggcaaactctctagtttcttagaataaagccagcttcatccactccccttcctaatctccatatattcttcaaactggtgcttagatttcctggctatcttgcagatgaattctaatatctactagtcagtagaatgcatttgtgtacttacacacttattattcaacaaatgcctattgagtgtcagtcatttattcaacaaacatttgctgaatgtctaattaagtagcagatacagtgctagttacttgagctacaatgcggagacagggcctctttgaagagcttgtgtttcctctccatgaatgctagtctcatgctttccacgtaaaccctgcttttgggaatcaagaaaagttcacctccttcatgagacttcttggattaacctctctcagatctgagcaggttgtccttctagaattgtcttaatgcatacatttgcagtcccttgtaaccttgttagactgcttctttcatgtagatgttttaaatttttcatagtgtgttgtgtacttgttcaaacgcaaactccccaagagagattcacttctggcaccttcatttttgcttttcatttcccctaatacattgctggacacttaattggtgttcaataaacatggtgaattcatttaacaaaagttattttgcacctaccatgctcacggctacaaatggacagcattatcacagcaactggacattacatagcatgcggaatggcagatggacagaccatatctataatatacttgggtaaaattttgaatgtttattagaatttcatccactgtctcatgtcttatagctacaagttaatttccaaatttgaatatgtccatacttgtttattaaaaagctggggacgatactctgtgagggtttctaaggagcatttgataaggtgtaaaaccactatagtcttggattcttctcattgctgagcagaatgggatgtgtcctgcagcaggttgagtggctctatgtggttttatgaccatacgtaggaacctgcttcttctcttgaaatggctgttttgttttatggagattggctagactggcaggtgacaaggcaagaggtgggctggccacgagagccagctgagcagtgcgagttggtgtgattcagccatttgtcaccaccatattctgccatagatagatattttctattcgagaaagtggatcaaatttcactgtacaccactttctcactaggctagaaatacatgaatggtggggcatagttcactccaaatctgatccatctaaacttttctttctggtgagttgatctgttttgagattttacactttacataaaaatagtatagcagccactctttgccagtcacaaaccacctttagctgagagtattatcatatcaattgtttcaaggaaatgacaaatgagtagttaccaaaaaaagaatgaatgaatgaataaataaataaacacaagggaatgagttgttactagacagagaagaaaaagattgcttggcatgtcccaatttggttattgaaaatttttatttttgatgcagtgctcttcttttttccttccttccttccttccttccttccttccttccttccttccttccttccttccttccctccttccctccttccctccttccctccttctttccttctgtaacttaacacctatttgattttttgaaaacattttttattagatgcttagatcagctgggacaacttaaattgcaagctaccagaaatatcatattaaactaaccagtgaagatgacagtttggatcatggaggtagggttgatttcagctgaggtttgctttagcagttgcaacactgtgatcaagatctgccttctctccctccatttcaatctagtttcctggccttggctctattctcagcaggtcttgtcttcctgttcctaaattggccatgagcatctcattccttattctaatccaacagggattatacctgttggtatacctactcctcctacttcctcccttagtctgtgggggaaaaaaaaaagaaagaaaagaaaagaacttctgagcttcaatgtgattaggtcatatgcctatcactgaactgatccctgtggatagtgatgggattttgctgataagtctcagtctcagcccctcccccaataccaccatccactttacagctgtggcttcactcaacttcccttgaaacactgtatggagaggaatggatgcctaaatgacaacttgggtgtcattaccaagaaaaagggaactatatgcaagacagtcaaaaactaattaaatgtcctctctaaggtttcatttttaagatagcacagagtttgctgctgctcctcctctttcttcttttttttttttgagacagagtctcactctatcacccaggctggagtgcagtggcatgatcttggcttactgcaacatccgcctcctgagttcaagtgattctcctgcctcaccctcctgagcagctggtattacaggcacacaccaccatgcccggctaattttttttgtttttagtaaagagggggtttcaccatgttggccaggctggtcttcaacttttggcctcaagtgatctgcccccgttggcctcccaaagtgctgggattacaaatatgagccaccgtgcccagcccacattcttcttaaagggtttgagattttttttggaaattacagggcatatagctttgtgctttattcaaaatgtcatagagcttcaaacagttcttcctgagacagatgtaaaacaattttaagatttctgagaagtaatttatatatccttataatagtcataccatgtgaaacctggcctgctaataataagaagaaacatctggaactagtgacagggtcaattttgggtattctctctctatggagaggactagttcttctgagattgatgttggcagtttggaatcttttcccagtgggaaggaagacttagaagaggatagttgatattgcctctcctcccacaagcaagtttcatctttatcacagttccctatggctatgccattttgagatttgtatacaaaccctgtacattagtgagggactcactcagagaccacctagactccaatcagtatccagcctttaggagatggcttgacctgggcagcttccccagtgatggagtttacaaaggatgacaatgaccatattttaaatctgttgttactctcttgcaagactcctctttttctcttgcttgctcttcaccttagcacgtctgtacacacctgcctttggtataacttgaaagacagccctaattgaggcattcatctcatacaatccaagagtcaggaacacagcttttggaaggaatgcattgtggattcttcagatgtgatttaatgaatatccaactgtacttagggactaaaaagagcatttttaaatgagattttgctctgaattggaaagtaagttgaggtgggaaataagccagccattaaatgctctagttttttttttttttttttcttgagatggggtctcagtctcactctgttgcccaggctggagtgcagcagcatgatcatggctcactgcaacctccaactccccatgctcaggtgatcctcccacgtcagcctcccgagtagctggaactacaggcatgtgccactatgcccagtaaatttttcataatttgtagagacagagtttcgccatgttgtccaggctggtctcaaactcctggactcaagcagtctgcccaccaaagcctcccaaagtgctgggattacaggcatgagccatcgtgcccaaccatagattttttttttcataatggcagagaatggctgcaatttagggtctttcttaggttcttcctcatccatttcttgcagaaaatttagtactttgtatttctttcaataatttcaacaattttatcctgacttttcccagagcaaaaattaggatggggatgttagagcttcctttgagcaggctatcatcgcaatgaaatcttgaccttgccccttgtagttgcctattgctttataaaacttgttattgaaattgcaaacagtccaaattatatagtagtttctaatgtactttatcagggtgtcagtttttcttttgcaagtgttttgaggagatcagattgttaatgaacattctttgagaatctgaacctgagaactgtctctttaggatgaagttaccaaggacagatgcaaaatttgcaaagatacggtgttccagcctcctccaacaaaggttaacaaccacccgagaaccccagtgccacttacctaccacctcttacctttggaagcagattgcccagtgacggataagtgtggaaactgttcaaagattgggaaagaaaattgttagaaaaggcacatagagaagagtgggattgggggcaaaaggagaaggaggatagtcttctgtgtttttttgattggttaacttaaaatctcagctatttgtttacacaaaggctatgttgatgtccatattcaacagatacaggtatttggctcagaaaagcacatggttcccagaccatttgccaaatgtcctatccttgttcagctttggttattatgaatatccttctggaagcaactgacacctaacatgtctgaatcctctggacctgtagagttcttaccccggagtgattacaatttctgaaaagaacatccctgcaaaattagctttcaaaatacgtgcagataagcccatagaactgggaattcctccagggaattatatcctaagtagcctactacaatgcttgattccttgggcaccagtggttgctcaataggttttttaataataaaaactagaaggaaagaactattgttagctaaagttaccatgtaataattggcttgggtatgtccctgcttgtttgaattgcttaatgtctgttctttgcacagcagaaactcttgtgccacttcctgattagtcatcttggtcttctgtttcctgagctgtgctccatgatctcgtgtaaatatatacaatttgtgataaaatcatcttgctcattccatagcaggtataagtgggttaattctattgggaaacaagctcaaattttaacagaagtttttctttgcttcaagggaacgagtttcccaacagtgggaattttaagcattttggcaaatcaataggggagatattttcaaaccagcatgattctatttggctcaggtaaaagtaagcccttctggactggcttgcaggtgggttcttgagtcttggcttatttaaaaagctgctgcctgttcttaataaatgccatgatatgaggcaccatgaacaagctggatttaaacctgccctatcaataattttactcataagttcttggcaagtatgtttgttgtctgctgtctgcctgtcaaggttgtcagttagctaagcatcagccaaccacatgatgctgagtccccatgattaatctgacttggtaatactgttcatctatgtaaagaattggaaaaagtagatctcccttcatgcgtgtgcgcgcacgcgcgcacacacacacacacacacacacgcacaccaatttgtttaaaataaaaaaagattagacgaaagcataaaatcagccctctggtctgaagcaattaatctgtagaagatgctacatatgctgggtgtagtggctaatgcctgtaatctcagcagtttgggaagctgaggtggcaggatcacttgagctcaggagttcaagaccagcctgggcatcaacacaagaccttgtctctactaaaataattttctaagaatagctggatatggtggtgtatgcctgcagtccctgctgctctggaggctgaggtgagaggattgcttgagcccaggagactgaagcttcagtaggctatgatcacatcactacactccagtctgtgtaacaaaatgagatcctgtctcaaaaaatttaaaaaataaaatgaaaaagaagatgctacgtacattatacacatataaattagtaaccaaatggtttaacaacctcagtgattgtgttgttctgtagtttgatgacttttatcttgctccttctcattgccattgattgtaccaggttatttcctggagcatgttgtatatcaaggtttatgcaactgtacatttaacctttcagtgcctagctttccccttttcctatagaatcacaagaatttgaaggcaacacaatatgttttctatcttatagtctgaagttaatgcatattaatggcatgctgctattactagttaatactgatgccatgaggattagataatcattgtaaaaaatgtttaatagagcattttttacaatacttagtggatgccagtatactaaatcctttatatatgcttaggtcttttatttcccacaaatctgtgaactaggaattatgaacgcattttacaaaacaggactcgttgcataacttgccaagtcacacagctaatgaacaggagagtcagaacttgaactcagggttgcctgcctctaaagtcctccactaattctcattcattctgtaaaaatagaacatggcctctagaatctcgtcatttagaaaagaacagccttttggagattggttagctggtttgagaacatgtagtttgtttatctgtgtctttgactagtaataacgttcagcctcattaaatctagtaagctaaaaggaagcaggaaatggctgtagtatagacgcttgatatttcagcgatgataatgatggataataatgtgatttcacagcttgggttatcagacccaggtgagtggataagtggattcagattcattaaaatcaccgggcctagtttgtggccttcctttcacaaaccccttaggctgcatattaccctttaatagcatatttttcccattatagttgcccttgctattcatttcaaccacattacaagtataaacatgtacaagggagaggacagatgtccttcccttctgtattaactctcttgttgtatgaaataatgttatgtattaaattattgtctcagtttatagagtctgctagactgtgctgttcagtagaactttttgggatgatggaaatgttcaatgtctgtactgttcactaaggtagcaactagttacctgtgttagttgagcgagcacttgagatatggatgatgaaactaaagaacagatgtttaagtttatttaacccatctaaatttaaatgtaaatacccacatggctggtggctaccttattggacagcagagatttagaatagtaaagctgaatggaccttagagtacatgtaaggcaacacattctttttattttagaggaatgtaggactcagagcatgaaaaggagtaaaaccaagcctaggatcctggtctcttgacttctagttcataatttcttccactaaacttaaaattgttaaaaatgttactttgaactttagtatttgaagattatcgtggtaagactttgcttatatttacaaaagcattgtaacagaaaataaattttgaattacaactgtgactttatcatatttattttacattttatgattgctaaataggtcatatattgacgtctttacatatttgttgggagcaaaagagttgaaagtaaagttttcttcccatctatgttatttagccattgattcccctctccaaagggatcagtaatagtttctttgtgtatctttttaaacattcagatatattaagtatttaaaactgtgtattgttctctcatctttttaaacaactggtaggatatgtacactacacattcatatttttgcattaaacttatatgtggagatcttttgatgtgagtacacaaaaagggtactttaaaacagatacataagcttctattgcacgtaccaactgtagtttaatgcatccctatcgatgaatatttacttcctttccaaagttttctcttaaaagtaatgctgtagagaataactttggacacataactttcatgtgtgcaaatacattataagataattcctagaaatgaatgcactaggtcaaatagtatatacacattttaaattttgataaatattataaattgctctccatagagtcacagcattttatattctcactgacaatctgtaatctctatgccttcatcaacctagtgtgttaccaaactgatcaattcataccattctgacaggtggaataaaatctcagtgtagtttaaatgtacatttttaaaaattgtgaatgagctgggcatcttacatatatgtaagggccatttgtattttatttattgtgaaatatgtttgtatgctttgtccatttccatcagtttttaaaattgacttagaggagcttttatatataagacaaaatatgacatatatggtaaacaaaatgcaaacattttcttcagttgtttgcctttttcactttgtttttcatggtgtttgctatggagaaaatataaatttttacataaacagatatgccaatctttccttttatagcttctggttttttgagtcaaaaattgagagaccttcctcattctgagagtataaaatagtaattatttttaattttaattaatttatttttattgacacctaataattttgcatgtttatggtttaccatgtgatgtcctaatacatgtacatattgtgaaataatcaaatcatggtaattagcatatcaatcaccttaaacatttatcattcctttgttgtgagaacatccaaaattctctcttctggctgcttgttggcagtagtcaccttactgttcaacagagtactagaacttattcctttctatgtaactatatctgctgaccaacctcttcccatctcccactccctcctattctccctagtctctggtaactactgtcctactttcaacttctatgagatcagtttttctagattctacatgagtgagatcatgttgtatttttctttccatgactggtttatttcatttatcataatgtcctctagcctcattcacattgttgcaaatggcaggattttatcctttttgtggctgaatagtattccattgtgtatatgtactgtgttttctttatccattcatcccctgatggacacttaggtggattctgtatttcactattgaaaatactgctgcaataacatgagcatgcagatgtctcttctatatactgatttcctttcctttggatatatacccagtaatgggattgctggttcatatatttttaacattttgaggagcttccatactgttttccacaatggtagtactgatttacattcccacgagcagtgtataggagttccctttcctttacatcctcgccagcataataacgattttaatatatttggaatttattctaaagatgtaaagtatgactcagacatcatttattaagcaatccatctttttcccagttatttgagatcccacctttatcacataaaaattttaatatatctttgagtcaacatctcactttgtagtctcttccatggaatctgcctattcttgcctgtaccacctgttttaattattttagattttatagtgtactttaatatattgaagaactattctctcattgctgcatttcttttttaggctgttcttcaccactgttacttgtttatattttgtatgaaatttagattcagcttgtctatttcaaaaacaatttctgttggtatttttagtaggatcatattaaagttcaagattgatttagagactttcgaaaagcattgaatctttctatctgggaacatgatatgcctttccatttgtttaagcattcttttatgttttctgtcagtgtttaatggttttcctccaataacttttaccatctataatttagcttattcctacattgttcttttttatgtcttcaaaatgggccttttgcatgtatgcatcaaagctattgacttgtattgattaacttgggcctcttctaaattttttcactttagaaaaaaaatattttagcaattggttattttatgttttccaaagacctaaatataaatgtacaggtgatgaactgcactttttcctttgaaatttgtatgcctttactttctttctctgatataattgtattcactatttcctccagaactagttaaactagagtagaaatttttggcatttttttggttcctaatcaaagttggaaaaacagacttttcccttgaaatgtagtgctggcatttaggttgagatagaaatatttcattatatgtttttaatcaagaatggatttgaatttcatcaaatactgtttaaacatctatgataataatttgaggtctccataggtttattaatatcataaatgaactattttagccttataactttaaaagccttattcttttaaagttttattcattctcctcccattcttgttcactattcgttgcccattcttgttctatataaaaaccccagtggtccctgctgtgaattcaatgacatcttatttcttttccttaagtcagagcaaatgtgcacatcagaagagcaaagtgtcaagtaatgatagctggaaattgagccacaaataaacagaaaatattttcttcattgttatttgtgtgtatgcttgtgcttctttttttcaagggagtagaccactgttccacatgttccacagttgttttatggtggaatgctctagttatggaaaaggagaatggagtctagccgtataaagttactaaacctgcttggatatgagtcaagggtatcctttttgtgcccaaactagaaaacctttccccttctcatatttttgagcaaggtgttttatgttgcaaagtagcccactgtctcttttcaactgcataagcccaaataacattttatattccagtcagtcacaaaatgaaaacaggaaacgtctttgaagcaaggcaaaaatgtcagagtgtctaaaacatagaagtacttggtgaaacactttcagcgtcttagctctgcctctggctagtcatttccactcgctgggctcagtcaggtctttcattagtgaaacagaggtggctgagcacttcctgtgaaatcgcagggacaggattgtggccctctggagagggggccaggaggaaaaggaaccagacagctggttttcgggagccaccagatgggagcaaatttccaaggctgctgagaagaatggtctagaataacagaattgttttgtgaaggagccttcctaaaccaaatgttctgagcgtccccgcaagcagagcaaatgagcacatactgtgttcatggggaaaaggacaaatgactgtacaaatggagtaacaaacaatttacgaaaatgtatgtggcctaaatttagtatcaaggtgatgggcaaaatgacttacaccaatttgtgacggtcctgttgcaaattcaatgacaaagccagccagtctacctagtccatagtatccagcagatatatcagtggagatggcccgagtgcaggctgcttaaataagataaatcatctgtgaagaaggaaaaggtcaaatgtgctattctctgtctttttttttttttttttggtctgaattaaatggaaaccattacaatttcttccaagaaaataaaaatcagcacctacaataatgctgtctccttctgaccctgccaagtctgactgcattccacctggaccctgcctttgtctctcatgtttttatccaagaataagtaggctaccttgtagtaaacaggaaatcttactcttacctcgcactagttagttatgcgtggtacttgatccataatcttctgcccccatgtcatagaagataggtttttccaactctcagatggaaaatcactagtgcactacacacacacgcactcatgctcagaaatattttcacagatccatttttctctgtgtgacggaggttacataattatatcagtggatgtcctgcagtccagctggtatatgtagagcaactgcatgtttgtatcactctgttaggtgcagtgtaggacacaaataaagagagagaagggagagaacactgccgagtcattaggggcatgctttcagttcctatacagccaagtttttttttaggcttggcctatgcttttttcttagtttgggtttagtatgtattcattcattcatattgccatgtgtgttcaacaaatattttgggatgcctgctctgtgccagacattgtgctaggttagagggatgcaaagacaaattagaactccttttctcaaggagacttctggttattgtatttgtgataaagttttaaagttactatactttgcctgcctagaatgtagttggatctcaaaagaattactgagggttggaggtttgagtggcagaagagcaatgattgatgaaacagagttttgaaagatgagtggcctatttgtcatggaggtaggaatggggggtgggtgggcttctggagagacacagcagaagtgtagagaagaccatggtacttgtagggaacttctgtggtttagagtgagatggatcttgcaagagctcaggctggagactgagaaaatgctaagtcatggggggtcttacacaacattctagagaatttagactttcccctgtagacactgaggggccgtgaacagcatttgtacctctgcaagatttttctggcagagacatggaaaatggtttagaaggtgaagataaggagctcaattagtgggctatttaaagtgtgcaatccacagataaaaggcaaaaacaaaacctgaatcagaagagtataccagaaaagggtgccagcctattatatatggcaatttatgatttatttaacattgaaggaaaaaacaggccttcaaaaataataaaataagaaggtgctagctatttacccctataacttcaggtacaagaagaatatttttattttactgagctcctcaactgatttaaaaaattaatactcataccagattgtaaataattcaaggaatcatagccccttccttactttttttacatttgtaagatttaaagagtcatacacccagataacatcaggctgcagagttttagagaccaactccttcagtgatttttcaagatgagaatgttctccatgttctcctgcagaagcttctctgggagccccaatatgtacaagagacagaggtagaccactggctgtgccttccctcctcctcctccccattctactcagctctgaattgcagttgcatagtttgcaaacttaatgttgtcaaaccttgttattccataatgggggcatagttgtgcaaactggaagtgattgatttacccagggacagaagacttggttaatagtagaaaaggatccctaggttccctaattgttggacaattgctcttagcagttttggttaacctggtttttatctggcttctcagtagagatgattctttcataagatcacctgcacacaaccagctactcatatatttgcttatatgtgtcatatctgatttatgtacattttctgtagacaagcttgttttaggtcatgtacttattacttactaagtgtttgttttctccatacttggggatctaaattagtaagcaacaaactgacttggtgggttcaactcaataatatccaatgaagccatttcttcccattcctaaatcctaatttagctgtgggaagtttggatcaatggaaattaaactccatatatgccaacactatgggttgataacctcttccaagaatcattgcctgaccatcatgttccttctacctgaccactccttcctgcacttttatcacatattactctaagggatcatgtctaactttttgtcttcctcaattagactatttcttgaggccaggaaatgcatcattttatccatagcatctaactcaatatctaatgtgtaataaactcttaatagaaatttacttaataactagatagatagtttaagatatgcccttgatgtagtcaagaagacaaaatgtatgggtacatttccttcttgtgtctggttcctctttctgcattgtcagggcaagttttaccctctaatttcttgtggaccagcagctgtcttaattgacagtcccaccaaaccctggatttcataggatgtcccagacaatgagaaatggcttgaagatagaaaattgtctgtgtcttaaaataatcttctataaattatgcgtattaacacagatatgtagcaaactataaaggttattttgctctgaagaggaattcagaattagaacttggatgtagcaggacacctctgttctcattgccataaagaaaaaaaaaacaccttttatattgaatttcagtgaaccttgcagccagcatctgtcccattaattttcatatacgagaacaatgtggcatgattactcaccagcaacagaagtagcagttttataaatcttatgttgtagtggctggaagggacagggttgtgctctcattgtttccatattctttgtgaaattcacctttgcagggggtggtttgctctttctcttccagatgtgcacagaaatatgccatgtcactaaacgtcatgtggcttaacatttctccaattttcagctaatctactgagaaagtagtaattttttctgactagtggtggcctacttctcctataaggctgtcttttacaatgagggaagttggcctcactttatttataaaggtgcacctaaggctggtgctttctggttctggggctgcttaatccaccctctgtttcatttgatcctatagagtttgggggagggctgaacaacagtttcattgacgtgattcagattcaatttgctaagaacctgattgtgtttatgacattaataagaaacactttaagccttttaatacgaatccccagtcactctgcttcttccctttctactgatgatactttgtgatctacatagtttaaactttcattacacaaggaaacttctactaccacttgatgtgtgtgtgaataggctatggggaaaaaaaggttcatttttgtttgagttttttacttttcataggtcattgtcaatgtggtaagtatgctctttagtgggatgatccaacactagggcttcatattcaatatcatttacagaaatagtaaatgtcaataacagctaatgttcattgagtgctaatcttccaggtactgttcaaagagttttacctattatcaactcaattctcccaacagccatatgatgttgttactgttattatagataaagccacttaggcacaaagagattaagcaactagttcattgttacagagttggaaatggaaagccaggtcctaacccaaatgctctgttgcgcacttctctgctgtctgcaggtgggatgagaggtgggtgctgagctgcctcctgtggtgctgttttgaaacctgcccatcccaaagctaagggagtatcgctgtgctaaagggttcagtcagcagccttgccagttcggaatcccctagaaccaccctccatgcatgtcatgggcagctctctgagatttctggtgcctcttactggcttgttaagttggcagatttttctccccatttgcttccttcattataaaattcccatttccattttgcctctaggtagaagctcatggaactcaaatgggaaatgatgatggtggattttcctgctgaaaagatgtacctcaaaaggaaaaaatagtgtatttaacatggagaaatgaaatcctccgaagggagcttcatgaactaaattacccagaatggccttactgtctgttgtcagcatttttctgctgcccctttgagcatcagtttactcactcatgtgtgggtcagctctactcatctgtgaaggtagataataaaacctacccccaaaaggttgcagtgaagattaagtgatgtcatatttttaaaaatgcctctgtaggctctggtacattccaatggcttggtgaatttttttttttccttttccttttccaaagggaattaaaaaaaaatgagagtgagttttgaggatcctagagcaagtaatcccagcactttgggaggatcatgaggtcagaagttcaagaccagcctggccaacatggtgaaaccacatctctactaacaatacaaaaattagctggatgtggtggcgggtgcctgtagtcccagctacttgggaggctgaggcaggagaatcattcaaacccgggaggcggaggttgcagtgagctgagatcacgccattgcactccagcctgggcgacagggtgagactccgtctcaaataaataaataaataaataaataaataaataaataaaacagcaaagcttctatgaattctccttttagcccttcatataagtctattcttcaggagccagtttatattttatggttagatacacatattaaattattggtatgtcagatatgattctattagtagtctccagggttcatagcttgttagggaaaatcctcctaaaaagaagttctttttgtctattcttcattaacttatttcacttgtaaagcattaaaatgggtcctctttacatattatgttgttttctaagggacaaatactagtggttattattacagttctttttttcatgtttggtacttcagtggttgattaactgtttcttaatcctgaaatgtggaggaggtttttgcaagtggttgtagcctggttttgaatgaaggtgaaaatgctctttttgttagctctagatcagcagaggtgaataagcatcatgaatttaggagactggcgtttttttttacataaaagttgctttgttgctaattagtagattagaattcctttaattgcattctgaccaaagacttttgggtgttcaggagggcaagttagcatgtgttgcatttgaatttatacatttgagacacattttcttactgaagctgatattcatgaagcagaaaagataaaaacttgtacatacctttttatttcttgattttaatgttgaagttctattctcagaatggattttataggcaacaatatgcacttaaatttatgatctgtttacgagacctcactgtattttgacagaggtcaaaataagggaaatcaatcttggttctcattccaaagagttttttttcctgatatcttaaaaaggctttattacattatgttgatatccatggcagagagttccaaagacatccccatgaaagggctataaatgtgaggtttgaaaccaaggcaagtcaagcagggtaagcaatcttttcacccaaggttttaaaataactgctgataagaccttctcacagattttcattcatttcttcctagttataggcaggaaattctgaaagcaggtgaattctaaaattaccttataacttgatttcagaatatagttacacaaagtgagaataactcgatgaggatgctgtttggatcttgagtactgtaagtcctgtggtttaattgacgagttgatggatttcttttatgcctaaattcaggctgaaaggcctaaaggccacacgaggcagtttatcacgagcgctattctccgtttttatattctggttcattaccagccccttcctcagtacttctatttatataatgttgttctggtcaaggtttatactaaatctcttttaacttcaacatccaacaaatatttttaaggactaatgtgtgcaaaacattatgctaggtgtttcctaaggcttcaaataacttggatgccagttttggactgtaagtgctcacaggataatagaaaaatcttgtttgcaaataactggaacataatgtacaatggaatgtgtcataaggggagtgcacacaatgctgtaggaattccaatgaaattcaccctcatctttcattgtattccctgttatttacctctccttaaaagaaagaactataagaactctacatcttttagtggcgatttcctagatagaaaaataatgaatattaaacatgatgtgttaggattggtgaggctgaagaaattctatgcattttgtcatttagtgaatatgtattgactgcctgcctattcagtgtcaagcactataggtggtaatgtatcaagaggttcatgaactaataataaaggggcacctctgtatttcacaaatatttgctgaatgaatgaactcattatattttattctcctatgtgattcctagataagttctgctacctaaaggaaagcacttatggaatccaaggtttggaaagggcttgaaagatcacattaataggtttcccttttatttgcctttttgaatctcaatatggaataactttgacttatccatactaaattgcatctcattggtgttacacaatctttccagtttttcaagattatttttaacttatgccaacaacatattaaatatcctttccatctatgggacccattccattttctaagtttacctaagactttaaaagacattaagccatcagagccaaaaacagagtttctctacttccatgttgatattctccttaatctacacttccattcattcaataaatatttactttcagggtgttcggatgagctatgggttacatagtgatgaattcagcagacatagcttctgccctcatgaagcttacagcctacaactacagaggatggggctgttgaagcagctaaaaaaccctaccttttctactattgagcaataaaagaaatgtttttcttgaatttctgagatcatttcttgccagtctttgctcatgtcactacctggaataaactcccttttatcatattgggttatcaacatcttatacattcacaaaagaccacataaatgttaccagctgcaaaaatcttattcatgtctgtgaaatccattaacatgtggcaccacttgagttgggctcatcacttgctgatttctgctgtcattatttgtgaatgtctaatttcactgtaagctcatactgtcctttcaaacatgaatgaggcctttaacattgttgtatcaatccataacattgaacataataccctgtttgaggaggcatgactatagaccctttctgtccaataataaagatgttggtaagagtaaataaaaggtctcatttcttgataaactggttagaatcaaggaggtctgagcatgacactagggttcctaaatactttcattctagacacataaaacctctagaagattaaattcagacaattttaaactttagatacacattacaacacaaagaaatgcactattataaattttaatgggggaaggccggtaattcaggaaactgtcagatctgaataatgaaataccagatagttcttatctatttacatactctgtgatttctaacactctgaacaataatatttcagggttctaaatattggttagatttttaaagttttcgaaattatataactagatgactgctctcaaaattaggccggtattttggattacacagagtgcctaaaagtgcatttttcctcctgaaggggaaagccatgtgcctagccaatattttcattccctaaggatccatggaattatgatagcttaccctcatcagtcacccaggctcccattggtgtgaattgggcaatgctgtttacatagcaaatacacttccttttatacaagggtccacaacccctgggccatggaccagtatcagttcacggtctgttaggaactgggtcacgcagcaggaggcgagctgcaggtgagtgagcaaagcttcttctgtacctacagccactctccattacttgcatcaccatctgagccctgcttcctgtcagatcagcagcagcagcaaattctcatagaagcatgaaccctattatgaactgcacatgcaagggatctaggttgcacattccttatgagaatctaattgctgatgatctgtcactgtctcccatcacccccagatgggaccaactagttgcaggaaaacaagctcagggctcccactgattctacattacggtgagttgtacaatcacttcattatatatcacaatgtaataataatataattgaagtgcataatatacataatgcacttaaatcatctccaaaccatcccccactgccaccctggagcatggaaaaattatcttccacgaaacagatccctatgccaaaaagttggggattgcagctttaatagactcagaggcatagtcttagagtgtaacaaatgcacaaaccttttcttttaaaacagactccagagggattgaagagagggaaccagtgataatctatatgcccatttcatggcagacatgctgctgtgtgctttccatgcattatatcattcatccaacaggcatctaaagaatatagagtcaagaacagttaagccattgccacaagatcacctagctagtaaatggctcaaactcagtgactcaaacccaggatttccaaccttaaataaggctctcactcccacaccgcacagctgcatatctgagtgtttatcagtgaattacattgatgtaaattcatttatgaaaatgtcaagatatcgtgagcactagtgcttttaggagagaatatttaactcatttcagacaacatatattaacttcatcaaaagtttgcctgttataaacctgtgactcactcttggtcaccatgatggtgcaacagctgtccactggacaaatactaaataatattttatccttgccccctatttcttatgagaaagccacaatgaacttccttttgtctctcatttcacccttaaagggacaaatagcattgcattatccttgaaagggtcttctgctgacccatctttgacgcttccatcacagggtgacgatgggatgtttgctgtatcacacttccctgtgctttcatgaatgtgttactggtgatgaagaatgccaattctttgtttagtagcagtttgctgggtctccctgaaaataatgtgtcagttaggctacctataaatctgagtcagtaatgtacttctctaaggtatatttatgttttgaatttgtctctgagcaatctgttggggggaaattttgctttaatatgttttataaaaaggtgagaaagtaataaagtgtaatgaagataagataaattttctaataaaataaaatatagaagtgttcaaaatttttgctttccccatatgactttgttttttccccaaatgttaccctcataacaggtgggttctgtctcttgatgggtatcaacacagtgaccacaaccgaggaggatttagcaagggaatcttactacttgtaacaaataagggaaacaccaggagcaattcccaaagcagtatctctccaagctggggggcagtcagattttataagtgtagggtaataaggtgtgatctgattggattctgcaatgaggtgttgtcagaaggcataatctgactggattttgccatgggatgatggcagagctcaatctgtttggatcctggatcctgccattgttgtgtctgcttttaattcagtccctactccttggtcagagcacttaggttccccctgtggttgcactcttggttcttccgcacatggtcaggttatgtgacctgagggtccatggcaactgaaaaacaagaggaactttgttacataaaaaattgaaccagatttgcctggcatggctacacaaatggatgtctctgttcagccttatttatccacagtttttcctcctgctgatccctttttcttgcctgtcctccctgcctgctcacttgctttctggcctctcttgcctctcttcttagccagagctgtatagggatttagttcagtgtttcctccttcattgtcattggacaatattcactcatcagctccaggtcacctccctgtcctcacctgtgaccagtcttccttccaggttcattgccattttcaaagtgagtctgcactctctcaccacccgtttgcttatcacccactctctatgtgattacttgtgatttgacatctgcccatgctactacaatgaaatggctttctcagagactatcatatgtctctattgacaaaaccggattagtgctgcttattttctgcagtatttactgttgttggacaccgcttccttcaactttctcctctcttggttccagggcactatactaactttggtggccatatactcagtgcctccttatacatgagtggaagtaaggggttcagaatgaaatgattcagtcagtctcataaagagataggacatctgtggagattaaagttctcagagttagtagtctcattgctttattccacatgatgttgacaaagaagtagaaagggaaagccaaatccttcaatctatattgctaattaaaaaatgattttcttttcttctttttagtaaatgtttgatggtgtcttgggagtagccttagtagcaaaaggaaatatttatgcatgtctttgggaaaatgtctttccattttctgtggttattgtatctgtaaaaattggacaccatttcttaaaaggattatgtgaaaattttatgatgcctggttggtgaaaggcagagtgtcctgaaatatctaaaatgtagaatcatattctttctattgttttgatataattagaagtgtcgattttaaaattacactgaaaggcattttatttttaacattgttttattaggtgagtgcaaaagtaattgcagtttttgcattgttgaaatttgccatttgatatgggaatacattcttatttttaattaattaatttattattattatactttaagttttagggtacatgtgcacaatgttcaggttagttacatatgtatacatgtgccatgctggtgcgctgcacccactaactcgtcatctagcattaggtatatctcccaatgccatccctcccccctccccccaccccacaacagtccccagagtgtgatgttccccttcctgtgtccatgtgttctcattgttcaattcccacctatgagtgagaatatgcagtgtctggttttttgttcttgcgatagtttactgagaatgatgatttccaatttcatccatgtccctacaaaggacatgaactcatccttttttatggctgcatagtattccatggtgtatatgtgccacattttcttaatccagtctatcattgttggacatttgggttggttccaagtctttgctattgtgaatagtgccgcaataaacatacgtgtgcatgtgtctttatagcagcatgatttacagtcctttgggtatatacccagtaatgggatggctgggtcaaatggtatttctagttctagatccctgaggaatcgccacaccaacttccacaatggttgaactagtttacagtcccaccaacagtgtaaaattgttcctatttctccacatcctctccagcacctgttgtttcctgactttttaatgattgccattctaactggtgtgagatggtatctcattgtggttttgatttgcatttctctgatggccagtgatggtgagcattttttcatgtgttttttggctgcataaatgtcttcttttgagaagtgtctgttcacgtcctacgcccacttcttgatggggttgtttgtttttttcttgtaaatttgtttgagttcattgtagattctggatattagccctatgtcagatgagtaggttgcaaaaattttctcccattttgtaggttgcctgttcactctgatggtagtttcttttgctgtgcagaagctctttagtttaattagatcccatttgtcaattttggcttttgttgccattgcttttggtgttttagacatgaagtccttgcccatgcctatgtcctgaatggtaatgcctaggttttcttctagggttttcatggctttaggtctaacatttaagtctttaatccatcttggattgatttttgtataaggtgtaaggaagggatccagtttcagctttctacatatggctagccagttttcccagcaccatttattaaatagagaatcctttccccattgcttgtttttcctcaggtttgtcaaagatcagatagttgtagatatgtggcgttatttctgagggctctgttctgttccattgatctatatctctgttttggtaccagtaccatgctgttttggttactgtagccttgtagtatagtttgaagtcaggtagtgtgatgcctccagctttgttcttttggctcaggattgacttggcgatgcgggctcttttttggttccatatgaactttaaagtagtttttttcaattctgtgaagaaagtcattgatagcttgatggggatgtcattgaatctgtacattaccttaggcagtaaggtcattttcacgatattgattcttcctacccatgagcatggaatgttcttccatttgtttgtatcctcttttatttccttgagcagtggtttgtagttctccttgaataggtccttcacatcccttgtaagttggattcctaggtattttattctctttgaagcaattgtgaatgggagttcactcatgatttggctctctgtttgtctgttattggtgtataagaatgcttgtgatttttgtacattgattttgtatcctgagactttgctgaagttgcttatcagcttaaggagattttgggctgagacgatggggttttctagatatacaatcatgtcatctgcaaacagggacaatttgacttcctcttttcctaattgaataccctttatttccttctcctgcctaattgccctggccagaacttccaacactatgttgaatagtagtggtgagagagggcatccctgtcttgtgccagttttcaaagggaatgcttccagtttttgcccattcagtatgatattggctgtgggtttgtcatagatagctcttattattttgaaatatgtcccatcgatacctaatttgttgagagtttttagcatgaagagttgttgaattttgtcaaaggccttttctgcatctattgagataatcatgtggtatttgtctttggctctgtttttatgctggattacatttattgatttgcgtgtattgaaccagccttgcatcccagggatgaagcccacttgatcatggtggataagctttttgatgtgctgctggatttggtttgccagtattttattgaggatttttgcatcaatgttcatcaaggatattggtctaaaattctctttttttgttgtgtctctgcccggctttggtatcaggatgatgctggcctcataaaatgagttagagaggattccctctttttctattgattggaatagtttcagaaggaatggtaccagttcctccttgtacctctggtagaattcggctgtgaatccatctggtcctggactctttttggttggtaagctattgattactgccacaatttcagatcctgttattggtctactcagagattcaacttcttcctggtttagtcttgggagagtgtatgtgtccagaaatttatccatttcttctagatttctagtttatttgcgtagaggtgtttgtagtattctctgatggtagtttgtatttctgtgggatcggtggtgatatcccctttatcattttttattgtgtctatttgattcttctctctttttttctttattagtcttgctagcggtctatcaattttgttgatcctttcaaaaaaccagctcctggattcattaattttttgaagggttttttgtgtctctatttccttcagttcttctctgatcttagttatttcttgccttctgctagcttttgaatgtgtttgctcttgcttttctagttcctttaattgtgatgttagggtgttaattttggatctttcctcctttctcttgtgggcatttagtgctataaatttccctctacacactgctttgaatgcatcccagagattctggtatgttgtgtctttgttctcgttggtttcaaagaacatctttatttctgccttcgtttcgttatgtacccagtagtcattcaggagcaggttgttcagtttccatgtagctgagcggttttgagtgagattcttaatcctgagttctagtttgattgcactgtgatctgagagatagtttgttataatttctgttcttttacatttgctgaggagagctttacctccaagtatgtggtcaattttggaataggtgtggtgtggtgctgaaaaaaatgtatattctgttgatttggggtggagagttctgtagatgtctattaggtctgcttggtgcagagctgagttcaattcctgggtatccttgttgactttctgtctcgttgatctgtctaatgttaacagtggggtgttaaagtctcccattaacaatgtgtgggagtctaagtctctttgtaggtcactcaggacttgcattatgaatctgggggctcctgtattgggtgcatatatgtttaggatagttagctcttcttgttgaattgatccctttaccattatgtaatggccttctttgtctcttttgatctttgttggtttaaagtctgttttatcagagactaggattgcaacccctgcctttttttgtttcccatttgcttggtagatcttcctccatccttttattttgagcctatgtgtgtctctgcacgtgagatgggtttcctgaatacagcacactgatgggtcttgactttttatccagtttgccagtctgtgtcttttaattggagcatttagtccatttacatttaaagttaatattgttatgtgtgaatttgatcctgtccttatgatgttagctggttattttgctccttagttgatgcagtttcttcctagtatcgatggtctttacattttggcatgattttgcagcggctggtaccggttgttccttttcatgtttagcgcttccttcaggagctcttttagggcaggcctggtggtgacaaaatctctcagcatttgcttgtctgtaaagtgttttatttctccttcacttatgaagcttagtttggctggatatgaaattctgggttgaaaattcttttctttaagaatgttgaatattggcccccactctcttctggcttgtagagtttctgccgagagatctgctgttagtctgatgggcttccctttgagggtaacccgacctttctctctggctgcccttaacattttttccttcatttcaactttggtgaatctgacaattatgtgtcttggagttgctcttctggaggagtatctttgtggcgttctctgtatttcctgaatctgaatgttggcctgccttgctagattggggaagttctcctggataatatcctgcagagtattttccaacttggttccattctccccgtcactttcaggtacaccaatcagacatagatttggtcttttcacatagtcccatatttcttggaggctttgctcatttctttttattcttttttctctaaacttcccttcttgcttcatttcattcatttcatcttccatcgctgataccctttcttccagttgattgcattggctcttgaggcttctgcattcttcacgtagttctcgagccttggtttttagctccatcagctcctttaagcacttctctgtattggttattctagttatacattcttctaaatgtttttcaatgttttcaacttctttgcctttgatttgaatgtcctcccgtagctcggagtaatttgattgtctgaagccttcttctctccgctcgtcaaagtcattctccatccagctttgttccgttgctggtgaggaactgcgttcctttggaggaggagagtcgctctgctttttagagtttccagtttttctgctctgttttttccccatctttgtggttttatctacttttggtctttgatgatggtgatgtacagatgggtttttggtgtggatgtcctttctgtttgttagttttccttctaacagacaggaccctcagctgcacttctgttggagtacccggccgtgtgaggtgtcagtctgcccctgctgggggatgcctcccagttaggctgctcgggggtcaggtgtcagggacccacttgaggaggcagtctgcccattctcagatctccagctgcgtgctgggagaaccactgctctcttcaaagctgtcagacagggacatttaagtctgcagaggtaactgctgtctttttgtttgtctgtgccctgcccccagaggtggagcctacagaggcaggcaggcctccttgagctgtggtgggctccacccagttccagcttcccccctgctttgtttacctaagcaagcctgggcaatggcgggcgcccctcccccagcctgctgccgccttgcagtttgatctcagactgctgtgctagcaatcagcaagactccgtgggtgtaggaccctctgagccaggtgcgggatataatctcctgatgcgctgttttttaagccggttggaaaagcgcagtattcaggtgggagtgacccgattttccaggtgccgtctgtcacccctttctttgactaggaaagggaactccctgaccccttgggcttcccgagtgaggcaatgcctcgccctgctttggctcgcgcagggtatgcgcacccactgacctgcgcccactgtctggcactccctagtgagatgaacccggtacctcagatggaaatgcagaaatcacccgtcttctgcgtcgctcacactgggagctgtagaccagagctgttcctattcggccatcttggcttcaagagcgggaatacattcttacatgtggttatgttatacatcattttaataggtatttctcacttgtttttgctaatgacttactacttgctgtttattttatttttattttagactatgaaagtgatgttagataaaaagcaaattcaagcaatttccttattgtagttcaaaatgggtcataaagcaatggaggcaactcacaacatcaacaacaaatttggcccaggaactaacgaacatacagtgtagtggtgattcaagaagttttgcaaaggagatgagagccttgaagatgaggagtgtagtggctggctcttggaagttgacaacaaccagttgagagcaatcttgaagcttatcctcttaaaactacaagtgaagggccaggcatggtggctcacgcctgtaatcccagcactttgggaggccgaggcgggcagatcatgaggtcaggagatcgagatcatcctggctaacacagtgaaaccctgtctgtactaaaaatataaaaaattagtcgggcatggtggcaggcgcctgtagtcccagctactcgggaggctgaggcaggagaatggcgtgaaactgggaggtggagcttgcaatgagctgagatggcgccactgcactccatcctgggcaacagagtgagactccgtctcaaaaaaaaaaaaacaagtgaagttgccgaagaactcaacgttgaccattctatgatcgttcgacatttgaagaaaattggaaaggtgaaaaagcttgataagtggatgcctcatgagctgagagaaaattaaaaaatcattattttgaagggtggttttctcttattctgtgcagcaacaacaacaaacaatttctcaatcagattgttacttgtgaggaaaagtggattttatatgacaactggtgatgaccagctcagtggttggaccaagaagaagctccaaagaacttcccaaagccaaacttacaccaaaaaaatgttcatggtcactgcttggtggtctgctgctggtctgatccactacagctttctgaatcctggctgaacaattacatctgggaaggatgttcagcaaatcagtgcgatgtagtgaaaactgcaacacctgcagccagcattgttcaacagaaggggctcaattctccaggacaacgcccgactgcatgttgcacaaccaacacttcagaagttgaatgcattgggttacgaagttttgcctcatttgccatattcacctgatctctcgcgaactgactcccacttcctcaagcatcttgataacttactgcagggaaaatgcttccacaaccagcaggatgcaggaaatactttccaggagttcatcaaatcctgaagtatagatttttatgctacagaaataaacaaacttatttctcattggcaaaaaagtgttgattgtaacggttcttattttgattaataaagatgtgtttgaccctagttataaaatgatttaaaattcatgatctaaaaccgcaattacttttgcatcaaccttaatatttgaaaattagtaaaattgcaaaaagaaagcccttattagctgttaataaatataaaatatataaaatgtgtgtgtgttaaactaagtgccttgagtatatgaagctatgaaaatgaagacaacagccttactaacattccatctcattattgttataactcctggttccatcataatcttgtttttccatcccaacagaatctgaggtgcagtcatttttgtgaagctgttattttcatcacaatgtgatctatacctaatgattacattacctgtacatctgaagctcgttcgtaaaccatcgtcccctgagagtatacctaacataggaaatactatatatatttggccgctgaagtgctataatgatgccctaaattacatatccctttctacagacataatttgctttattaaaaataacttctgcataactattgaagaataaaacagccacttatgcacaaggtgagggatatctgcatatctgagctagacaaaaagtatgtttgataatctattgtatgttttgctacaaaagcaaagtggttccttatgattggctgaaactctttgagttcttgttctatctttcagcaaatgaagatgctaattgtctttattctagccttttataacattaccttggctcttcaaagtcaaatggaacctggaaaatcgaacttaattccattttacatttttcccttgaccatttcccatggtggggaggtatgtgtctagatttggaaaataagcctgcttagttttttttcccagctcagtgcttagaaacaaccccctctagcaaaaccatgcctaggaaaacaaagtatccagctaggctttcaaggttacttgggggcaagacatggatagttacgtccttggaggaaaataaatacaaggcagtagatccaaatgtatttgtcatgcaaagaacattagctgagagagagcttccatatataggtttgcaaaactgagagcaaagccaaagccattcctgggttttgctttgtgatatagtctccaaatggatactattatgattaatctattctgagttccttaaatgctattgtaacaatgtcaggggccaagttcaagtctaaagtacgtgtatgatgatcatagctgctataatactcataatgctgaagacatagtaacaacaatttataataggagagcagttttgtgcagcaaaatagttccgtggagcagaattagatcatgaaaatgttgcatggtgggcatttagtcgtgaaagtataaatctgtacctaatgattgatgtgaatcaggtttcaaacctattagatgtgccatttaaccaggcaacatttgcccattatttttttgcatgaaaagtaattaccgtatgtttaatagttactgaattgtgactggcaggtgtgccccaccataataataatgatgacaataataatatcttcaacttcaactcactctccacaagtcagggcaaagagagaataaacaatgattatttggcgtgtttgaataatataaaagccagtctaggtaatttaaggcaaagatcactttcaaaagccagatttatatatttttccctcctccattcaaataattgtctcagagtcccatttcaacttattttaatagttacttcctgcatatctgtgatgggttctcaaaaactttcaaaaccactttcacatattccgttacttagcccttaacaacagtgtcgaatagggtaggagagaaacattgttccctgtttttcatttagaaagccgagattcagagaggttaaatgactgtttctactccacaaaaagaaagaaatcagttgaattttctctgataaacctgccaacgttagtgatacgaaagtgaccacaccgatagagtggtgtcactgtcaatattattctgttggcaaacatattgtatctggaagtcaagggcaagaaaagaaagttagaaattgctgagataagggctgtgctaccgaaaaaacactgaaagggtgccccagctagggtctcaaacctatacctctccccttcagcctggtacttcaatactgagtagattatggtgcccattttgagggaaggctagtgttatctcattcagattaagttttgtgttggtgtgacacagatgggtttatataattaatgtcatgtcctagagggctgtgaacattcctacacttgaggcagtgttcaaaatctattactgtttttttttaattaaaaaagaatttgttttctttttcccctagatggaacttaaactcattgtatatgattgaagaggaacaaggagaaggagaaggagagaaacaacatacaataaagttgtccaccaattgtcccaggaaaatttgtttctcacataggggtcatcacaactgctgcattgcagtcagctggaagtataatcttccatgaatctgaagatgtgatgaaagatagtaggcacaggcaaagcctagctttaagaaaaacataaaatgaggactttgagaccctagggcctctttccttcttcttccccttgataggcaaaggcttttttccaaatcatctttgtaagaagtcccagacccacaatgaactattgaaataccatgatccagtaatgtcatcttcttctgctattaatatggtaatcattttaggtgatagatttcaccttcaacagttcttgaagaacattcagacagttcaccctgaaatgggtgaaaaaaaatcaggtacctcctatttcataaggatgtgagccaggatgaagcagtatgttatcaggcttggcatttcgcaagctgagtagagtccatgtgatcaccaggtataatgttatgctggagttgggtttcatctcttgcttgggtttggaatgtaaacaatcttgaaattgtatttggagagaaggaaaccctgggaaatgtttatttttaaaaaacatggattttttacaaaagcaaatacatgttctaatttacatcagggagcagatacctctttacttttttgagatttttctgagacattaaccttaagttatcacttgtgtgtatcaggagaaaagttgggagagtgggagagatgggtaaggaaacatttttaaatgtacttaaatctcccatgatttatttcaagctgtaaagcatttctaaaactcgagtttgttaattatcccaaggaaaaagaagagaggaaaatagtcaatctgatagactggtgacattccatgtagcctgatactaagttgtgacaaaatatctaacattcggccattgtttttgatatttgtactttttcttgtaaactatttgctctgggacaaaaagtcattggttttgaacttgatttgggcaactaaatgatatacttaaccacctgctttagcccgaccatgactttttaatgacttccattttatttggttttggaaattgatttgccctttaaaaataatatcagcatttaaagtaattttgcttgttttttgtttgtgtagtagctaaatatgctaagagaatgacttcaaatatgcagcctttatgaagatgtgaaaattgctgtgctctagctacaaatggcaattccgataacaagagcttgaatgtggccttgaggcaagggaaaaacagaaaaagtccactgaaagtcaactttgtccccttaatttgcaggcactgtggggagcagggaatactccatgggcacaggcatcctcccgagccatattggttgtagtgttgtctattatatctgcacagttcctcctttgattctttctatgaatcatgtgttagcaacccaagtagctgccattagctccagccatatgggtgaaggtaggggtagaggttgcagagcttaaacataggtatccagaaatcattggctcttcccatttcctgactgattctccaactatcaatctgcttgtaagcacattcacaccactcagtgcccctggtacataaaacaagagcagtgactgaaataagctctcaaactagcaaactgaacaagctatacaagacttcttggatattgaaaatactaaacattctcatagctatagaattaattatttggaagatattggcaagtaccttttcatgtctacagtgtccatctattaaatgggaactactactctgaaagtagcagtaagttttattaggggaagggggagaatcatcacaatcatctaaaactgttttgtttaatgttacctgccaagatatgtgtctaagaggctgctgtggctcccaccagccctgacctctgcacatcactgaacctgtatcctactgttaatgatacatatgtcatatttacaaatgcctcatgtgtctcagggtggtaaaaatgtttctattcaagaatggcaactaaaaacacccataggtccatcatattggattaaccacttatatccagctacctgaaactactggcactactcagaaaataaattttcttttaccatcttgcccacttaccgttctcagaaagtcctgcctttcctttcccttctttatccaattaacccaacttttagctcttacatcaaatcttctggaaagccttctagacatttctctcccttcctctctgccattatttctttttcaggataggttagatattatactgggcgctctcatagcttcatgggcatacccatgtcaaagtagccagcaatcgctattctaagaaacttgtctgaatttgtaattggattgtaaatatcttgagtgcaagatcttcaacttgtatagttgtatttccaattttcaacatatgttgagtgaatgtattctaaatataatattaagcatggcctatacctggtaatataaacatggaaatagaatgattatttaatttgtcatgtctgtgaaggacccttgatggtatctagtcttaaccctcaacttacagttgaggaagctgaggaccatagtgtattcattcattttttgtttattaattcatgaattcattcatgcaacacattgcattgagcatccatgtgtgcttggcactgagctagccactgaccaggtaatgctaagtagagcagaacaaaagacatggtccttccctcatagagcttacctcttagtgcagtagagacacagtaatccaatcatcacacaagacatttatactcaccaactgtgctaactggggactatggcagccaactgatgtgaagatttggcttaatggcaggagtcaggaagcctttcctccaaggtgtggtgtttgaactgaaatctgaagaaccagcagaagagcacaaggagggaaaggagtttgccaggcccaggccagtgggtttgaagccttgaggcaggggggaatgaggtgcattcaagaaactgaaaggcggaaagtgcaggagcagaagaatgagggactcaagaagaaagaggcagtacaaaataagaatgaaagatggtcaggggccagttctgtaggacctgtagccatttaaaaatgtttagttattaacttagaacagtgagagcactgaaatgtgtgagggtcagaagaactgggaggtggcctgataacacatgcattttgaagaatctctgctgcagtgtagagagcagattggtggacaattgatggactgagcagataggtgagaggtagccctactgggaagaatatgctgaagtgtgtgcaagagattttggcagcctggagagtagagagcaccactgacctctctgttttttctaactttctcaaaaatgctacgttcacctacatcttatcaaagaaggcctttatttacctatacttctagcatgctttgctttagattttcccatttctcaggtaagggcacagaggctaacgaacgctcctttcctggggccaaagcgttttcagtttgggcatctcagtaacttttggcaccactgctggctttaaggagcctgttatgtagtctatggtggatctgaataccaggcagacagatgacatttttataaatagtgtgaggaaaccccagaagtaatgtgaatggatgagagttcaagaccactgctgacctggaaagccaatgactgaggcaccagaggaagtaggctctcagagggaagacagaacaccccctttccagctcattgagagtgaagcaggtgcttttctgaagcaggtgatattctgaagatccacctcctcagaacaagtgttctgaagtttctctgaaatgcagagaatctaccatatgatatggttttgctgtgttcccacccaagtctcatcttgaattgtacttcccataatctccatgtgtcatgggagagaccttgtaggaggtaatttcatcatggggggcagttacctccatgctgttcttgtgatagtgagtgagttatcatgacatctgatggttttttataacagggttttcctcctttgctcggcacttcttcctgccgccatgtgaagaaagatgtgtttgctcccccttctgccacaattgtaagtttcctgaggcctctctagccctgtggaactgtgagtcaattaaacctctttccattataaattacccagtctcaggtatttcttcatagtagcatgagagcagactaatacaccatctgtaagaaacttggaaaaatgatttgtttagagttccatctgagcagtcatattattagtaagatatatatgtcgggaaaagaaatttacttcttatgactttttacattttgagatcttattgtttgatgctccacgttgagggagccatatttctccacctggtcaccaggctcattaggagggacagatgtggcctcacatttcatgtgcggttcttgtctcagcccttctttttctcaaagattcctgccttttgtctacttttctcaaagtgccatcttccttctctcaggctcttttgggattacccaaccaccattgtaggcaactctagttctataggcaactctagttctataggtaactctagttcagtatcatgactttcatggtttctataaaaattgccatcccacagccttcttcacatctgtgacaggcagttgagaggggactgaggaaaagtattgcccatacatggaatttgtggagactcaatcaatgttacttggattgagtaataaaggaagttatttgtctaagtttgggcagcaagagaatggcagggacagaaccaaaagcagtttttaaacgataatctttttttatttttttactattaaatacagcttgggggcaaagaagagggatacaatttgttgactttcattgctacatttttggacaaggaaagagaaacagagactcaggactgtttagaagtccaaatgctatttatttccccatactacaatggctgttgaaaattctcctataatatgctacaaatacaagtgtattagagagtttattgtgtatatttttgaacatagtgtaatttcttgtatgatgttaatacagttcttgttcttattctctgtaagagcttgtgttgctgttatctctagataggagcaaacttcataaaatgtagaattccctctgcatgcatagggaagtagcttttaaaatattagcctattccattgtttagttataaagtaaaatgattttttaaagtgcaggataagtgaatttttatgtttcatttttagttattgaattgtctaggtaatgcattttaggagggcactgttcctcccagaacttaggaaagcagtcattcaatcactcagtaatttttagggatttttaaaatagatataacaattttaggatgtcaagttttagatgtctagttttaacttgtttggttgagctgacatttaagttcagtcccaatgtgatgtgaatggacctagccttttacctcttctttttttcctcttcattggaaaccagtacagagaacatggtcacttaataagaaagatgtttcctgctttgtttccttttattcaactcagaactgcctgggggaaaagattgcttcctttctgaatgtggtaagccacaaaatggaaaatgtgcacacgagctctttcctattaaccttggggaaaggtgacagaaatgtgtgaacaatgctgttagctgtttaaatgttcttttattattattaatttggtttaagggttttgcctaacaagtaactcccttgatttgtatgtttcagagttgtttaatttttctccaaaataacaatttgtccttttgaaattctttgttagatttatgtcattccagtttcaatcttggtgatgattcttctatctgtcatgagtggtttaatctgcatgtttataattatagcatataaagccacataattcaaggtgggtcttggtatataattcctttgtactttttgggaaaataaggctgtaatggaagtaataaagatacctgagttgggaatgtttaggtatcaccaaatattagctgttcagaaaaatatccatgataaattagaaactgaaatcagcacatttttctggtttcggttcttttggggaaacactgttattttttaattcctggcttaagaattgtatttgattatgcgaagacaaatccaaaattttaaattctaatccaagaccttagataaattagggaattagggaatctgtgtatgtattttataaccatatcaccatatattgacatacctatgtcactgaaggtatattgtaaaagataatttggccaactgtattggaccaactgctcttgaactctctaagtacaattggtttaagatattgcctgaaatgactattttgcttatggtgtcattctttcatggtcaagatgacagttctctaggaatgttatttcatttctagaatgtcagccaaacagctttttatgatcctgagcagttatactctaccatcccaaacacacacacacacacatacatcttacacacacacacacacacacacacacacacacacacacacacacacaaataagccctgagaattttcagagaaattcatggtggaagatctgagattagaacccaggaactcctaagattccttggttttgtatcaaaggtcaataaagagacatgaagtcaatgaagtcaacaactgagggaaacatccctgaggaaatgcataatggaagtgctggtgtaactacctcaaataaatatttctactgaaactgatcagtcatccatttgatcaggtaaggcaggcaagcccacctctgattgcgtagtaattcactgatcattatcctgatttcagtggatctatgccatactcaagacctacatttgtcagtgacctgattgtcttattgccctacacagacatataatcagtccagcctgtgtgaaactccttgtgacccttatcatcatacttaagctgttttggtctttcaaatgtattcgctcttctttaccattttgaagccatcactctttcaccactgccagctagtcttagtaatctttcaccgtgcactgtctgttgcctcactgaatcctcacagtcattctatggcataggtaatatgattgtcattgacattatgttcataagggatccaaggttcagagggattgtattgttcagggttgcacagctaatttctagtaaagccaggaatcaacttgcgtctatatgattccatggtctatgcacttagctgtgatgtatgcgttctatctcaagtgatcacctctaaaatcaggatcagttcacagatatttgtgagtctctcaagagaactagggaaacttctgtaaagttagctaatggctttttaatgttatgtggtaattgtggtgaagcaattgtcaattccagttaaattagcttaaaatgataagagcaaacacatatctttgatgataaggctgggatagaggttaatgtctcatcaattttgggtctctcttagatgtttgaccttatcctaacaacttaagctttaggtaaagtctgcatttggtactctaatctcttcctatcagacacaggtgctcttctctgcccaactgcaattcagtccaagacatgccttctccagttagtctctggagaatgttgttcctacttagactcactgcatagatcttaacttgtactcctgctggtggtgtgcatatatgagctgtcacttgaccatgcagccacacctggagacccatttctaggttcagagtcatctctgatgcagcctgtaatttccccactagcatgccactctgtaggaatgaaccagacattgccacatcattctatgtagcattttcttaaaattagagcttcactataaacaatctttggtcaaggaaaggctttgttatctactccatggtctctttgagaaaaaaggcctggtcccattaagctcttgcctcgtttttgcctttcagggattattcgtgctctgtgttagatgtgaacttttggttaggtacataggaaatatctacctaagacacttgtgatttccaccaagtttgaaacagcaatctaaaagctaactcattcattaaatgatggaattgttaagttggtataaagtgatggtacaaaagcccatcagggcaggtttgaaatctaaatgcctttcagtatgcattgaacatgcgcatccatgagaaaatagtatgataaagaaagcagggtgtgaccttattggattcatatttccttatagaacctccaaattaagacaaatttccagacatttctaaaagcagcaatacaatcaagaaaacaaaacaatgagattcagtatgtagctactgcaaatttgtcagaaaataagtgggaaaataacaagatcctaggaaatctgttgtatggagctgaggaaaaggaatgagtttaggtttttctttaagttattgaagaaggcatgggattatcttctggttgctagtcttcccttagtttcaatgggaaacttatcagacacacttatcttgcagaagcaagataagaggacaaaagaatttggaagatcatggtggaattaaaaaaaaaggaatgtagtcagatggtaaatttagtctaattatatttagagatgggttaacataatcagaaggtaaggaacccaattatgagataggtgtgataacatagatggcttaataaaatacaaaatagaaagatataaatagaatgcttttatataaattctggaggagtttaaaaatgagtgagtgttcaagataacttagaaggaaagatattaatataaacttgaggtatgttggtcttgaagaaaaatgaaaaagctcattttgtgaaatgagtggaagaataccagctctttttcagattttcaccattttattaatattttttgattatagaattttaattatgtaggaaggaatttattaaaaagtaaacacaaaataaaaccaatcatatagttttggccaaattgttgcttttcttttacttcatttcctaaagggcatttctcagagtcacttgaaagtaaaacttgagagggttttatttttttgatttatttatttattttttttagtggctgtttgttgaaaaaccttgttgtaggctgctaggcattcttttactaagaatttcgaatgcacctcatgtgcaaaagactgcttaagtgtgtcactgcagaaactagcaggatttcaaaatcaaactcatcagttttctgtgataggatgatggtttgggagatactcaagaaaggagtacgtgttagtagctgaagatttttctgtcttcttccttgtgttgtcagatccacacttttattttccttttttttttttttgagacggagtctcactctgtcaccaggctccctgcaatttctacctcctgggttcaagtgagtctcctgcctcagcctcccgagtagctgggattacaggtacgtgccaccatgcccagccaatttttgtgtttttagtagagatggggtttcaccctgatggccaggatggtgttgatctcctgacctcgtgatccacccgccttggcctcccaaagtgctgggattacaggtgtgagctactgtgcccgtccttgttttccttttgtcaagaaagccagacattctgtgacacggtaaatgaaaaagggcttggacccaaccccagctctgttgcttgcttgttgcgttgccataagagaccctcaagaagaatctcacaaaatccactgccctcccttagtctcgctttcccactaaatcgctccatgcaaggggagccatttatattgcattaaacttttctcggtgttctctaattccaggggttcttactgcctgagagggtcactccaccatgtgggtaagcggggtgtccagagtctgcccataggccatcagcatcagtttttcaaatcctgggactttcactaaaaaactgtggttcttattttaaaaacaaaacaaaccaaaaaaactgcaaggaagcaaactccacaaaacccatcaaaaccccaaaattttcttaaccttaataacttgttctttttccatgcatatctaattcctccttttaaaaaatacctaaaaaattgaaattggtttaccacatattcctgttggcccacgacacataatgattaatattttttcctttataaaaaattgattgcttttactgtgacaactttgacaaagtctttcaaagagggagagaaatgtgaattcaaaaggataatgtggcttttattttttttactttgatcctgttttgtgaagcattacctaggttagtattgcctcatgttaatcagtgaccataaaggccattaggatgccttgatagatgcccttggtctcccttgactttgattgaagcatcttaaaggcctgtatgcatgtggcacaacatctaacattgtaattgctcactcagtagctctgagcacttactcttcaataaattcttagatgccgtggggatggcgaatgaactttttaattacatgtctgttgttttctatcaccaggaactaaattaatgggaaattagttcacaaggtttattatgcattttccctctttaagaggggactctttctgacagcccttccacttttatccttttaccatttttttttattggcctcagtactgaaattccttctttcttgttccaactacatcagaaacattcaatagacttagcagcctatgaaagtctgacaattacttcctcacggcagccttgtttcaagagtaggtccagaataaataaaagtttttcattttcctggtggcatctgttagttttcaacattgcccagagaaagagttactgtggaatacaaaaaaatgagctatttttttcttccttttggggagaaacagacatatagaaaaccatgagtgcttccttcataaatcatattttatgtgcaaccagtaagagagagagatgatgatggttgtggaaaagtcatagtggataacctcaatttattcagtcttctgagataatgtaagagtaaagcatggaaacaggaatacagagttcatcataattatagatcatccattcaaaacattttgaaaacagtgctatgtaaacttgggatgacaaataatgaagcatagttaacacttctcattggttgtgaattttcaaatacatccaagtatttaatcatggccattcatcattctgtaaatcaaaactaggtctttgaattctctccctttcctattctcagattaaggcatatttggtttcatataaaatcttatgcataattttgaatttcttgggccaatcaaataatggtacataatttaatttaaaaaacttttcagaaggagaaaactcatgtttcacatacttcttattaatcctaaggcctagcaaagggtacatacagctgtagttcacctcaattatacactgtaaatatttagattagagacacgaaataagttttgggagttgcaagaatagaatcagatgtaggaggtattcttgtagaatagagatggagatgggatttaaaattttttatttcactgctagagcaataaaatcagtattaaaaacaaggagaggctgggcacgatggctcatgcctgtaattgtagcactttgggaggctgatgtgggtggatcacgaggtcaggagttcgagaccagcctaaccaacatggtgaaaccccgtctctactaaaaatacaaaaattagccgggcgtggtggcgtgcgcctataatcccagcaacttgtgaggctgaggcaggagaatcgcttgaacctgggaggcggagattgcagtgagctgagatcagaccactgcactccagtctgggtgacacagcgagactccgtctgaaaaacaaaacaaaacaaaacaaaacaaggaggggcatgggcttggattttcataggaagagaggctgagaagaacaagaatgctgacatttgttttgtgaaatgggtctgaatgcctataaaagactagcaggtactcagacatgcctgtcaccacttggcagcaaagcaaggaaataggacagtattacatttgtgaagttgttgatcagaaaactagtgtgcagaggaatttgtgtgttttaaaatattcccaaagtggcagaatattactgacatttgaaacaatagcacagtctacctatgttaaaatggtatttccatttttaaattatattttttcaataaaagtcttgctctcttcttaagttacagatttttactttttcattttgcttgttcctgtgctccttgatccatcaatgaaaatgtgattttctgttggagtcttcgataaatatgtaaggctattttcattgcatcagaaagctgaaagggaccttggctgatcatttgtgtaattgaatcgtgtctgcgtttagggcacaattttcattttatgaaagaaacacaagatttcccatgatgttttgcatgtctacaaattcaggcgaatgagtctttcctcgggctcagtgagatcagtggggtcatgctagtgaattaactggcatgatatttgcttaacaaaagcatgccataaataagagacttaatagtcagttggcaagttgcttcatgctaatgctgtttttaaaatttaaagtaatggatgaaataaagttttatatacatgtctggatttttgaaaaataagaagatttgaggcatagtgtattatagcagaaatgtcttttaatttatttttagttgttttgggtacatggtaggtgtatatagccaaaaaccacaattacttttgcatcaacctaatatttacagggtacatgagatgtgttaatacaggcatgcaatgcattataatcacatcatggagaatgaggtctccatcccttcaaacatttttgctttgtattacaaacaattcaattatacatttttagttttttaaaaatacaattaaattattattgactatagtcacccagttgtgttatcaaatagtaggtcttatttgttctttatagctatttttttgtacccattgatcatccccaccttcccccaccccaaccctcccactatccttcccagcctctggtaactgtccttctatttccatgtcttttaaagtgtctccctcatttctgtgtacatgtgactcactggggaataaacagggaaatcctttgtgatgaatcagatgtcattctgagacacagagcttcttatacttttctttaaaatcatatttgcccttctagatcagtatcaagcaaataacaaccaagaatcaacatgcataaaaatgacaaggttatcccagagttctagttgtcattttcatagttgccagcacccttttccaggaaaacaaagagagtggccatctaagtgatgccgttgaggaagctgcctttcccctaatttctggagagcctagtgtagagggagaactcctgcctctgggaatatagcttttagggcatccctttatccattctccaccattccttcagtgaaggaaattataaaagcaaaactgggacccaaggcatgctttgagtctctttgcctcagcccgggcaactgtattctccgaattgagttcattaatattgtcttcttaggagaaatattatctttctccagactgggcagggagtctggcttgagaggcaacaataaagaaagaatatgtcttcctctataaagaaaggccactttataatgaatttcctttagatcacgaacagcactgtaagacccagactgtcaacttgtgcttttgaggttaggagctgagaaaactcttcttgattaataattgagacctaaacatggcaaaaaacaggtctgcctcagcacggagatcatgcatcgaggtggcgggcgatgccttcagtgggttctcttttcttcctgtctcctctgcgattatgtggcaagtttagagtcaactacaggaggagtttcagacaagaagcacagtttgatagaaactaatttctggattgtgattgtgtgagacctcctgggtgttcctgagactttcggaggatgattcttggccttgctttgtttttgttcttttcttctttaggttttcatctgaaggcaagtaactcatgtccctacaaggaaattcccctgaggaattagagataagcatgcatttctcaataaaacattttcagaaaaaaagttgctgtgtttccgggagaagcagatggctgctattgagagacacctaggtttgtgttctgggaatctgtctcctactcatgatagcagggggcagattcagatctgcaggaggtagaaataggcatcagatcactctgtcctaaaaaacaaacaaacaaacaaacaaacaaacaaacaaacaattggaagaaatgaattgatcacagaagcatctagagctaggaccaattaaaagtcagttagtttatatgacctatttgaagatttctcaacaatcttgacctattgcttaagagcacaacatttgtagtaaaatgagcctaagttaggatatgacttaagatcactgaccagctgtctaagcttgttagggttacccaatattgtgaaacttcagtttccccatttaaaaatatggaggcaataatagcaattacctaactggttattgcaagcattaaaggaggtcatcaatttctgtttgaggttggaaaatccttcaaaagctttctattcatttgagtaacaagcaaaacattctgatttaatatctgtatgtgcttcagtgtctttgattatcacatttagaatattcaatattttacttgtaatagtgaataaaaagtttgctggttgagagagtgaataaatgggtgaatggaagagtaaataatgactcttgtaacactattagttatggagtggatacacactagaccagtggggctgagaaaatttaaaaaatattcaagcagtagaaatttttacttaataaatattgcttgggaggctgaattaatgataaaaataaatgttttgcatttgacattatctacccaataattcacttctctctgcattctctcactctcttaaagaagggtaccacattgatgatgctaaatgattcttgtagaaccagccagaggtggaaaagaaagtagttctgacacttggttaaaaaatatacatatacataaataaagtcaaactccactgccatctctactcaaagtgtgtgcatactttcttaagtacacgctgagatgactcattttacacttctttttttacatatttaccctgttttaatgggttggggaatggcaagagcaaaggaaagaatagctgattaccattcaagacacacatccaaatcacataaagaaatctttagatctgagaataattgtgaaaagaataccaaattccagtgtagctttaaaaagtgcaccgttatctttaattacctgcttgatagaagaatatttattttggaataagaaggaataatttcaaagttgatggccttgttataaatataagcaaattaacttttttagaaagccatttcgaactccgaagacaccagcaacatttttattgattaattctttagtgttataacaagcaagttgtttttatgccgtatttatgagctggtatataatcacacatctcaggggtggagaggaccttaagaatcatccacttcaacagcttatttgaaatgtgtttgtttttatgttctgtatatattctgttcttttggttatctctctctctctgtctctgtgtctctctctccatgtatgtatgtgtgtgtgtgtgtatgaaatagataatatatataaattatcataaaagtatatttacatatatattttaatgcccactctattggacttgtaagaaaatcttacttctataaagtactctagaggcatatacttgtagcttattttgtgacatatgtttggtcatacatctaataacaaatctttgatcaggagcataattccaattagagcagtggttcttgacagcggcagtgttccatcctaggtattttatacatgtatcagaattttattttatcatctcaatgactagtaaaaggcaaggttgctgggtgccctgtgatgcatgtgacaatctttctcaaaaggaatcctcctgcttctcctaaaatatttgaatgacccactggattttgatgtaggttagagactgtttataatcatcggagcctagattttattttacttaaatcgcagagtactgtttttgctattttaatatgctgtaagttttcccagaaaacaacttgtataaattgacaaaacttattttgttcagaatttttccaggagatgctcaatatttcagaaaacgacctatctaaagacaatagtgtttgtggcatttaagatagaaataaagtacaaaccgtcagtctgcatgcaaactgtagttactgtattctcacgattctaattatgggtgcaggcacccaggactttgctatgttttcaaatatagtttttttctattgctatatatggaaattcttataattttattctgaattaataaccttacatcttttttatgatatacttgggacattatattgatttttaaattttgtatacagataggttgtattatctataaatttcaaatcatagatgatgtaacttattatgtctatgataatgaaagaggcattaaattatgtacgagtgcaataaggagttgcgtttgatagggccaaaaagccctgaaataaaaaagcagtatactcaggggaatttgctacatcttctagtacaagtagaattatggggcaatatactatttatcgattgttatatagtaatatcgccacaaactgagtggcacacatttatcatcttagagtttctgtggttcaggagtctgagtatggtttagctgcaacatctgcaaggctacaatcaagatggtggccagagctgcagtctaatttgtaagattggctgggaaaggatctatttcatgagtcatgcagttcatgtaggaatcgaggtccttgaggcctgttggactacagacctcaacttgttgctgtctgctggataaaggcttcgcttacttcctcaccgtgcagctctcttcagtatggccacttacttcattgaagccacaaagggagaaagtctgaaatcaagacagaacatataatcttatgtaatgtcatcatgaaagtggcatcctgttggcggagcttgcagtgagccgagatcgcgctactgcactccagcctgggcgacagagcaagactccatctcaagaaaaaaaaaacaaacaaacaaaaaaaggaagtggcatcccattatctttgctgtattccattggtgacaagtaaggtatagattccacatgtactcaaggggcacgcattacacaagggatgaccactcacctgcaaggataattgaggaacattttcgattctgttcaacacagccaatttcctatagcagtgttaggtggaggggatgagttattgggatcagaaggtagctagtgtgttctgtagtctttattccaatgaaagataactttacccattaatgtgaagtcaattgtactcagagaagagggaaaactagattactagaatgtaatctgtttaagtcttgtaagactacaaagtccttactaatttgatgtgcatttctctgatgagcatttctgtagcactggagtccagtgatgcagggatgggttatccacattttctgccactcaagatctttccatccaggtgatccagctagttctcaggcccatcaaactttgatccagggtcagatctggaagaggtagagagcatttttttaattccttatttaaaaaatgtgatttttgtgggtcatgtgaaggtttgttataaagataaacacgtcatgggggtttgttgtacatattattacatcattgaggtattaagctcagtacctggtagttatcttttctgctccgcttccctcctcctaccctccaccctcaagtagacctgagtgtctgttgtttccttctttgtgttcctaagttcttatcatttacttccctcttataagtaagaacatgcagtatttggttttctgtttctgcattagtttgctaaggatgatggcctccagctccatccatattcccacaaaatatatgattgtgttcttttttatggatgcatactattccatggtgtatatgtaccacatgttctttatccagtctattattgatgggcatttaggttgattccatatctttgctattgtgaacaatgctgcaatgaacattggcatgtatgtgtcttttccggtgaggttgcagagaaaagagaacccttacacactattggtgggagtgtaaattagttcaaccattgtgggaagcagtatggcgattcctcaaagggctaaaagcagaactaccgtttgacccagcaatcccattactgagagcatttaagagtcaaatgtattcatgacataaatgtgtattgaaaatctgatatgttttagtgattgttttatagggagggggcagagactctgcttttatgaagcttacagtgagtgccagccaccattttagcttttgggggccttctctaagaagggtggagtagttaatgtagacaaacatgggttttggcagcatacgaccatgaattaacattatatttccgcttaccagccgtgtgattttagcttacgaaagctactctctggttgtttatttcttcaagtgaagaaatgggtctaatagtacctatcacacaagattttctgtgaagattttgtgagatcctatatattaagcacccagtgcataggtgttctcaatgttaaatcccctctccatgtctgaaccttcaataaaacagactattacaaattacatatgaagactttgatgtttaacgtcatccacacaaagttaggcaaaagtcatatataacaaatatttaagtaatcacctggaacaagatctctttagttattttttaaatatgagatctcacaattattctcagcatttcctgttcattgttttgctatgggtagcatgtcctgattactcagttatacaaaatatttgaatggcttaaaggagtatttgtgtttgacagcataaataatattgtttttgaaaatgtatgaatacagatagaaatcaatggactggagtatatgcatttgtctatcttggattgatctagtgtattgagtcacaaaatttagttgatagaagggatagagtatgagaaacagagtcccacaactttgcatcaacttagaaaattattcttttatttaacattcattcattcattcatttattcaacatttttaagtttccgttccaggatcttgagtacagacatatgtggttttattgcactttgctttatcatgctttgcagatattgtgttttttacaaattgaagatttttgacaatcctatgtcaagcaagtctattggtgccattgttccaacagaatgtgctcactttttgtcacattttggtaattctgaaatatttcaaaagttattattaatctgttatggtgatctgtggtctttgatgttaatattgtaattgtttgggagcacaacaaaccatgcccatgtaggttgcaaacttagttggtaaatgttgtgtgtaatagttgctacaccaaccagctgttccccaatcactctccctctccttaggcctccctattccttgagacaaaataatactgaaattaggcaaattcacaaccctataatggcttctaactgttcaagtgtaaggaagagtcacacatctttcactttaaaccaaaacctagaaaggattgagcttaataaagaaggcatgtcaaaagctgagataggccaatagctaggcctcttgttccagttagccaagttgtgaatgcaaaggaaaagtccttgaagaaaactagaactactttagcgaatacacaaatgataagatagtgtgacattctaattgctgatatggagaaagttttagtagtctggataggagatcagccacaacattctcttaagccaaagctaactctcttcaattctatgaaagcttagaggtgaggaagctgcagaagaaaagttggaacctggcagaggttggttcatgaggtttaaggaaagaagccatcctcatagcataaaagtgcaaggtggtgcagcaaatactgatgtagaagctgcagcaagttatccagaagatctagctaagattattgatgaaggtggctacactaaacaagagattttcagtgttgacaaaagggttttcttttggaagaagatgccatcttggctttgaatagctggagagaataaggaaatgactgacttcaagggacaggctatcttgttaggggctaatgcagcaggtgaccttaagtcgaagcccatgctcatttaccattctgaaaatcttagggcccttaagaattatattaaatctatcctgcctgtgctttataaatagaacaactaagcctggatgccagcacatctgtttatagcatgatttactgaagattttaagtccactgttgagacttactgctcaaaaactaaaaaaaaaaaaaaaaaaaaaaaaaatactcttttaaaaatattactgctcattgacaatacacctggtcactcaagagctctgatggagatgtacaagaaggtgaacgttgttttcatgcctactaacacaacatccattctgtagctcctggaccaaggagcaatttcaacgtctaagtcttgttattgaagaaacacattttttaaggtgatagctgccatagatagtgattcctctggtgtatgtggacaaagttcattgaaaagcttctggagaggattcatcattgtagatgccgttaagaacactcatgattcaagggaggaggtcaaaatattaacatttacaggagttttgaagaagttgattccggtcctcacagatgactttgaggagttcaagacttcagtggagaaagtatttgcaggtgtgatggaaatagcaagaaaattagaattagatgtgatgcctgtggatgtgactggattgttgcaatctcatgctaaaacttgaatgattgaggaattgtttcttacagatgagcaaaataagttttcttgagatggaatctgctcctgatgaagatcctgtgaacattattgaaatgacaacaaaggatttagaacattacataaactgggtagataaagcagcaacagggtttgaaaggattgcctccaatttctcaagaaattttattgtgggtagcatgctatcaaagagcattatatgccacagagaaatattttataaaaggaagagttaaagcagcaaatttcattgttgtctttaaaaaaacaattagcacagccatctcagacttcagcaaccaccatcctgatcagtcagcagccatcaacatcaagggaagaccctccaccagcaaaaagattatgactttctgaagattcagatgatcattagcatttttagcaataatgtatttacaaattaaggtatgtacatttttcagatatgttattgcacacttaatagactacagtatagtacaacttttgtatgcactgggaaaccaaaaaattcaggtgacttgctttattatgatgttcactttattattcagttcactagaactgaacctgtaatatccctaaggtatgcctatgcttgaaaaatgttatcagtaagatgtgtaatgtgtgacaaatccagataatacattacttttggagaagctgagctgtttcaaaagtgttccttttatttgaagaagaagcagagtagcccaatcaagtaattttatttattttgaacttacacaataatttacgcttttgtttttcagcaagtagtaagggaggtgggttaatctgaaatgaaatgttcttagatcctgctgttcagttggttggagggcattaaagatagttattacttaagatctctgttgttttgaaattcccattttcctctgacctaaattctatgatgtaaaagaatcccagccaccacagatagactgtttttccttatttaaatgctttaaaatttagttttgacggaatggtctcttaatagaattcttgtgattctgtaacatcttagcatctttggttggcacttagaatattctcccacaggcatatttcatttgcctgtatgcttgtattcctcattagcttatttcctctggagagtgagactctgtttctgcatgtaacagttgatcagtaaatgttttgattattactatttagatcctgaacatgaacgggctcctattcctttcctattgctgcccccaatgaatttttacattcaaaaagtaatgacgtgttatcttggtttttgtttctgggaaatattaggaatgctttttggcaaatttcaagggaatcctatttggcattagaaattatttattttgaggcctcgtgtaaaataagcttcaggattttgaataactttgggccctggagagagtaatacctaatgaaaactgcaactcaaagaaataatgaaaggcctctttaggaatcaaggtggtagctctagctcttgaagtcttctaatcaaagagtcaacaaccatttttgatctctgatcgccaaagcaggcctcagaggggtcaactggccatgcagcctgatctcagagtaatggctcctcctatttcaagattcaactcaagcatcaattcctgtaagaaaccttgacagaactgccttttctcccacctccaagtcaatgtgaccactccctttttgccttcactttctctcctgacttgcatttgatcagctaaatttatgtaaaaaaatgaagcctacaaccctaagctgatctgaaacacacagcaaatggaggtagccacatatatatttgataatttcccagtttatagcataacagttaaatcattgtaatttcttatggaatgtatggatcaaacattacatttattctgtattgtgtgcatttggagtaatccatttgacatttttttttacattgtgctagaaaagttaatgaggccactgaagagaaccaaaagtaggaattagaactgaagatacagcaagaattgctaaaagaaaggaaatactgtataaaagagaaaaaagacttttatggagtgattttagagtaactatggctttgtaaaaatgcacatcagtttatcagttttataagccaatgcttggtgggtatggagtttttcagtgatccagtttcaagtaaataagcaacgaataagaagaaattgtgtttctttctagaatgtgttgtcaaccactgaatttaatgctaccaatagatgcagactcatgaagtgcagtatgatttcgataaggcctaagcaattatcaaatcagaaatggatctctcatgctataaaattgtacatttaagcaaataattttaagataattggctttcaaactatttttggatgtatcagaagggatggttgtggaaataacagcacagtaaatgaatagttactggaggacaggaaagcagaaaaaaaatctgaagtgtaaggagatacagtcaagctgtttataaaatacatttagatacaaaagaggtcactgtgtggaaaacctttagaatcactgttgaaagaaaaaaaaatgtccacttcccaatttcaagttctattgggattgtttgtattataaagagttgactaataaattcctgccaaggattatttccctatccaaacaaaatgtccacaattctttatgagagaagatgatacccatagcttctgcttcccgcagtggcactctcatcacatatattggtaagtatagaggtgccaaggagaagcaggcaacagttttctccatagcatccatagtcatgctgttcagcagataagcctagtacagttagtatgtcctgattttttgctaaatcctgggaaaaatgaaaagagtcttccttatgcagttgtgttttgctgctgagttgtgtttgcagtgtattagaagaaatacatgtaggaagcctgttttcagtacaccactgtattactccatggtcttgaatttctgaggtcttaaaatagggttattaatattacggagaaagtcacactgctgggtaatctggttgaaatggagacagagcataaaccaatagaggtgtacacatatactaagaattttgactggttaagggaaacaagaaacaaatgtatttgttttcattagtaaatatgattttttctcaggatatgagtaagaattagtgaagagggaacaatattaaattattttccttagtaaggtaggatattaaaaattaatcccttctatttgtcagttttccatgtccagagttaattgaacagttgtgttaacattaatataacattgcttgctggctaccaacaataatagcatggaagaatgttttaaggtatgtcttctggtagaataactatatcctcattattaacagtgtggaaaatgtagaaatgtagaaggaagcaaataatcactcatccagagatgatccatgttaatgttttagtgtatttttttctatatttgtagctttgccaatttcacacagttactttttaatatatacaccggggttaagtctttgtatgattacaaaataaattcttgttcaatttttgagaaaaataaggaaactatgaaaacagtataaagaagagcatgtgtgattcctagaaaacagcaaaaataatttggaactgcttttaatgacaagggtaggcaatcaagtttgctaaaatgaataggataatcagctccagccataaataaattagtatctttttaatgtgtctgttgtgtgtattctgcagctggctcttaagtaatttttaaaggaggcctgatatgtgttcggagggggagcaacatgattagaatatggtagctagcttggaataggcatcatcaatgattcgaatgcatgctctagatcatgcatgctttggaagctacaaagcttctccaaatcttggagaagcaacacagtgagaaacctgtcactaagcttttgaggattcctatctggaagaggactgttaacagtaaactcaggctgcagttgattttctttccatcatcaacatattatctgggtctagtgaattacaaaccctcctcttggcttaacattctctctgatggctttctgcacattggcttcctcttcttgctatcacggtaattactcaggagacataccataggttttcttgggtttagatcagcttaggaaagaaaagaaaacttaatcagtgaacagatttctttggcattttccatgtaatcctgggacccctgcttgttagttttgtcctgtttcctgttacagaaaaggctgaaaatcagcatgcagatgaatgagatagcagatggttttcccgtgatagagaccaacaatttgtgagatagaatagtaacgacaaacatacataagagaaaaggcagaattagagtacagtattttaaaagctttcaggcgctcaataaatgctcactattgttaaagagagagaaaaaaggaagtcctgtataatacatcaataagattttaattttcagttattattatttgagctttatttcccagctctctgacacagatttaggggtggtgtggatattcttagagtggaaattattgaactcttagattaaaggtactcgagttcctagcttgccctgtaactacacatatagagaagatcactctcgtaggtgctagtaagtaggagataaaagttttagggggaaacacagagggatactcagaactgggagcagtcctaaggtggaccttcaaaatgattcatgtcttagaaaatatgatttaagagaagttaggtctatagggtcattttatctgaggaaagatggctgtaaggatctttaatgataggagtcaaatatatgagagattgttgcaaggagaatgttaaccagctattctacaactcgactggggatagaaatagctttaaattacaatatacagaatttagattagataaaggaagtatgctctgaaagtaagagttgttaaaagttagaatatgttttccaagtaggttacaaaattgttttaataaaattatttgtgtttattcaaaaataatgaaaacatatatattacatatataaatattgatatattacatatcaatatataaacctaggatataaacccaatatgtaattgatatgttacatatcaatatatattatacatgtattgatgtcttacatatcaatattatacatgtgttgatatattacatatcaatatattatacatgtgtttattatatgtgtgtgtgtctatgtacaaaaagatagctttttgacctcaacagcattataacttgataattgtcttattttggaactcacgctgaagtagctttcagatactgttctagaaggcttaaattaagtatgttgacaataccccaaactactggatgatatttgtaatgaatttcaccctatatcagtacagaagggtgtcacagttcagcaaaacaaaagagaatacgctttgttaaacctctactttctgaattttaggacagtgaggaaatttaacattttcaatttttttttcttttcttgactgaaaagaaagtcaagccagcaatatgtttctgagagagcagtgatgcatttcacaacactgttaactgtctgcttggctttttgaggcttccagagttcagaattgtcttctcttgaataggtcagtgcatttttttccttcagtttttctccttaagcagcaaaacagaccatttaacttccaaatatttacagcttgcaaacagataaacttcccaaatctgtttttttttatgaaaaggaaaacgatcagccacaataatctataatacgatatatttgaatcaaagttattagatgccctagggtcttttcatggcagattttatatatcaccaccattaataaatctgttatcagaattatgtctttctctctgttgatagttatttttagactaacatattcatacctccttctgatgaaaaacattaaaatttgaataaggcatattagaaaaccctaaagctctgtatttacacaaaggagactcataaatattggtttttcagggtgaagcattgtgtgttattccattttgtaccacagggaaagcctagtcacacatggggcctcattaaaagaggatctaaagaaatatttaatggttgaaatataaggtcttattctgaatatctaccttcactttataataatagaaactgaactgaaaagattcagtaagtgatttagaacatccactcattttaaaagtaatgtctaggcctaggaaagtgacatcatgttccaaatgttacaaatccagcgtttttccttgatgtctttataaatacattgtttacagtttttattctcctccatatatgatgccccttttctaagattatttcgtaggtatatcctttaatgagagaacctcataaataaacttcctgaatttgaaaacgagtgagaggagacttcaagtttgtggactgagctaaacatgtgtctactctcccttcaaacatcccatggaaatggcagtaaagacagaacaaagagaatacatttctgaatatactgaggaacatatactccagagagcagaaacaggaagaggggcctctgctaaagctgaaggagtcttcaggagggaacccagctgggctctgtgttctggttggcagatacagagagtagccaaggtcaaaagcagacaaacagaaagtgaggtgattggccacaggtttggaaatggctcaggtttgctctttccaaccccttgcatgtcactgcacatttacctccagaagtaaagcaggagaactctgcaaagggaaccaacaatctgcatgggagggcattgcctccaagtgtgtgggctggcgaccaagtgcagccctctgccctagttatgggagttggagagggacttactggtttgcatgttccatgcaagagctaaagcaaagcacatctcggagaagtgagccaggaaagtggatcaatccatgccaacaacctatattaattaacctgataattaatatgtatataaagtgaaaaaaaagaaagaaaaaagggaaacagccatgagacaggatttcacaacctctgcactatcaacattttgggcaagatactcttttgttctggagaagtgttctgtacattgcaggatgttaagtagcatgcctggtctctatccaattgatgtcagaagcaagcaacatccatccctggccactgtgaacaaaaatgtctcaatatctagacaaagatattgcagcatactctggaggacaaaaccagcactagctaagaaccattatcctagagaaaatagaaatggtttagagaagagatcttttcaagatatctaccttggtatcctcagacatactgaagaattacagtctctaaaataattttctgatacggaaaatgaagaaatcaaaggacagaaataacccacggaattttaaagtttaattaacaaaattgttgaaaaattcaaggaaaccttccaaaaggaaaagaaagaagaagttataatatgtgaaaaaggggaagagacaaagagaatccgtttaggaagctaagtgtctgtctaataggaattctaaaaccagagggaaaaagcacaataaatgagacaaaataatcatgacatttcctagagttaaagaaaggcacgtcctcagaatgaaaggcccaaataatgttgagaacaatgaattttaaaatacctacatcagacacatgctaatgaaactttagaataccaagacttaagatcctaaagattttgaaaaagaaaaacataaacaaacattctatcataggaatgacaatcacagtcaagttttcaatctgcatcttgaaaatgccagatgataacaggacagtgacctaatgttcggacagaaaacaaacctaataccaaatggaatcaaacaggaaactcagaaatagacacgttaatatgctcaagtgatttttgacagaggtacaaaagtcattcaattgccttttccacaaatggtgctggatgcccaatggcagaaaaaagtaagtcttcacctaagtcttacaccttacacaaaagtcaactgaaaatggatcacagacttaaatataaaatatgtacctataaaaccttttagaaaaaaacaggagagtgtctttcagatctaaggtgagccaaataatgggtcgacttgatactgagatcacaacttataaatggaaatgttgataatttggactttgtaaaattaaaaacctttgccctgcaaaagaccctttaaaaggatggaaagacaagctacagattgggagaaaatgtttacaaaccaaatacttgatctaggactagtaactcaaaagtcaacagtaaaaaattttagtaacaatctattttagaaaatgaacaaaagacacaaagagatatttcaccaaagaggatatacatttggtgaaaaagcacatgaaaagatgttcaaggtcattaaccattaagaaaatgcaaattaaaactacaatgaggtatcactatccaactatcaaaatggctaaaataaaaagattagtgacgagaccaatcgctggcaaagatgcggagaaactggattactcattcattgctgctgggaatgtaaaatagtacagcccatactaggaaagagttcaatttcataaattaaacatacaactaccatatgacccagcaattgcattcctaggcttttctcatagagaagtgaaaacttgtgttcacatagaaacctgtacgctaatgttgaatgttcacagcaactttatttgtaatagctgcaaactggaaacatctccagtgtccactaatgggtgcatggttaaacacattgtgatacatccataccatggaatagtattcagcaataaaatagaacaggcatgcaatggaaagttacatgcaacagcctggatgaatttccagagaaatatgctgagtgagaaaggccaatctcaaaaaattacataatgtatgatctaatttttataccactttgaaaccataaaattaaatgaagaacagattagtggttgccaggggttaagtaaagtgggaggaaagtggttgtggctataaaagtgccacatgaggaatgcttgtaatgatggaattgtctgtttcttgactatgagtgtcaatatcctgaatgtgatattgtgagatgttaccatgggggcaactgggtaaagggcaaatggaatttgtcttatttcttacaactgcctatgaatttacactgatctctaatgaaaagtctcatttaaaaatttgatagtgcttgattttatcagttgatcaagctgctcttagttgaaataacaatttcagaaggatcagcataatgaatctaccagtcactgaaaactctcaattatctgtcttgtcttccctttcagtttttgtttcatttctgttttagtaacctcttagaaaaaggtagtattaaaggagacctaggtctcttttaccaatttaggataacttcacaatctccgcagataaattggtatctgtgtacacacacaaaaataggaaattcttgtgagtagtttacaggggaagtgcttaatatataaacaaggcagtgctctggtaaaattacttattgcattgagattaagaacataataaaattattaaaatagcctaccactttcattacagacttaaaatgttcttccttttatctctgggggtttgataatccctgtttattgttcttttattttgctgtatatcacgttggccatttaatcattggctctttagcagggtgggtgtagagagcattaaaaaataataaatgatgcagtttatcatcacctccctgtaaaacacaaggcacgtgaaggatatgagtttcctttaagctaacgtatttacttaatgtgatttcaaacaaactcctacaaaagtttttggttatggcatccattttggaatttgaaaaatatatataattcatctgaaataaatgtataaaacagctaattttctggtaagatataatatgtgggattatcactactacttttcaaaatgtagtctaaagaatattacttaaatgagctttatgctgagtaaagaatatgggggaaaaaaccctaagagtataaaagcccagaaagagcctcttctacgtatgagagtgtatgtatgatatactatattaatatatgtattgtttaatataacctattttgataaataatagtataatagactatattatatactattatataatatagggaggaaagtaccattaaataaaagatactggagcaactggataactatttgaaaaacaataaacttagaccatttgttgcactatacaccaaaataaatttcatatagattttaaggttaagtgggaacaaaaagatatcacacacaaaaaactgtatctgaaagtaaatatgttctccttatagtagagtgaaggaaatcagttaaagcattcaaataaagagaaaaatgtaaagagaaacattagtatatttgctatataaatggtaaacgttttatatgtcaaaaatcatttgtatattaaatatttatattaatctgtcatatgtggtagatgattaatatacctagcatataacatgctcatataaataataaaaaaatcataagagaaaacaagacaaaagccatatatgtagataattcatcaaatggaaaattataaataagcaaattttgaaggaaaataaaataatatgttctatgattaaagtggtcaatgtctttaaaggctaatattaatagctgacttgtggtctgtaaagaatagtttatttaacatgtgacttataaaaatatataacacttttggacagcatttttagagataaatattccacactttttgtagcattgattaactttattcacatcttaaatacttataaaaatctgaatactactttatttcaatgttatttaaattggtgtcaagttctggctaatctacctaccgaatagtaagaatattgttatgcagatcattgttattctataaaatgcagtaccattcagtcattcaaaaatacatttccaaaaaatgtttagagaaaatgctaaaattatgctaagtgaaaattcagacaatatttaaaattttaatagtctgacagattctgatatagataaacagaaagaaagaaaggtaatgtaattttcatgtaattgtacccatgtatatggggaaaaaaggcttgaaggcagtatacaacaaaatgttaaggacttgttatttgcatctactatttcaagaattccttctgaatataaccaacagtttatgcacaaagaatttaattgcaatattcttaataacggtgaaagtcaaatattcatcaataggtaagtgtttaaattacattatcaaatactcagatgatataattctatgcaggcattataattatgtctttgaagtgtttctgttttaataatatgtaaaagtgcttatgatataatgctaagtaattaaaccatatgaatgtatgttaaaaggctgcatgaaaatatggtaaattgtttgcataggttatcattgagtagtgaaatcataattgctatttctttcttttttctttttttttttttttgagatggagtctcgctctgtcgcccaggctggagtgcagtggtgcgatcttggctcactgcgagctccgcctcccgggttcacgccattctcctgcctcagcctcctgagtagctgggactacaggtgcccaccaccacgcccggctaattttttgtatttttagtagagacggagtttcactgtgttagccgggatggtctcgatctcctgacctcgtgatccgcctgcctaagcctgccaaagtgctgggattacaggcgtgagccaccgcacccggcccataattactatttctttcattatgttctggacactccaaattttcaactacagggtccagcctttgcaatcaggaaaaaaaaagtgtttaaaaacatctctgaggacttacatataacaccagaaggatttatacatttatttagttaatgtggttaataaaaccaaaatattctttaaaccatgtcttagcttcattcttgtctgcaatactttggcactgcctggatttggcatcatgaactgctgcaactaaaataacagtaaggtgcatttatacaaaggaagaaatgagagattaaggtcccctgttaatactaaggagcctgatagattttgatatgttttgtgcactggtatctgtattttcattttattgatttttttctaaggaccttacagctaaagccaggtccccaaagaagtcaggggtttttgtgttacccacaacttggcagaatgtctgcaattactccttctgcttttaactgactttgaatcctctccttttggcttgagtacctggctttcagccaggagaagggaaaatactctatctgttggttttcaaatgtcatttcccctttggctttgttgatggtaaaattctgcctttgcatctgaaattggaaactcttctaatcctggagtctgagtgtaattaatcggaaggctttctcttatctgtgtctaggatcagcctttagtctgatcttcatttttatccaggtgcaaaactcaaatacttttacctttagtgcagtggcccaaattttgtccctagttctgcctgtgctatcattaactgtcattttttaattatatctacacacgaatgtgggccagaggcagcaagatctggattttctcttcctctctgagtccctgacccttggattgttcttccttcttttcaattttggtgggttctgggtttagatttgtagcctaacctagtcaacaacttctttggcatagaaaagaattatttctgatgtgtatattttcccagaagttagaatacccctttgatatatttatttgtgtttaatccacagaaagaatgaagaattaagttatattaacaagagtatcttgcagtatatatatgctttaaagttcacagtgactttgacatgcctctttcatttagttttcacaactcttggaacgtgtttttgcccattttctgcataagaaaactgaatttcagtaaaattaaattgtttttcccaggcaacccagccaggaatcactagtccccctctctcaaaatccagcatttgctcactagaccagagctgctttaaatgacaatagtgtatggaattcattatagtagaatccattctaaacacattgttaatggtttgatcaaacatctttagtagcaccttttcattcatgttttattatgtatgtgtgctacccactttctgtgcagaaatttcaaggaaaaggaaattaggctttctgtaatactcctaatccctgtccttaataagtccaaactctttaacatgatacataagactttcactatccggggaccccagggtactgcaccattctcatccatgtttctcacctctaagcttgtgatactcctgtcatgcagcattttcctttgttgtccaaacgtgtcctgctttaaatgttaccattctcaattctcatctgcctggtgaccttgtgtttcagtggttgtctggagcgttagtgttcattagaataacctggagggtttgttaagacatagcttcttggacgcccacttccaggtttctgattcagttgatctgggccctgaagttgcctttctaacaagtttccatgtggtcctcttgctgctggtctggcatcacactttaagaagtattattctacttatccttcaagacctcaacctaattgatctacagatccttttccaactataggaatatttaattgcttgttactctatgctttcaagctcttgtttgtgtaacatctcacattttttggtgactatttatgagtgtcttctttgcttaactgtcttccttttacaagggaaaagacttgtttgacttgtgtttagatcctcatgggctaacatgatgggaactcatgaagaatttgtatgaataaataatgaacctggaaacctttgttcatttaaagttgcttgtacaggatgaatgttttgcttcattggtttccattattattgtcttcgttcccattcaaattctgtttctaggcaaactggaagaggaaaactatgtaaactgaaaatacaattctaagcctcccaaccatctgagtggaccccttctctcaaccaagggcattccaaagttaacctgaaaaactagttcaggccatgataggatgggggagtaggacatgcctcaatattccctcctcccttctggaactcaggcacagctgaccagtattaacattaaaatagattttaagactgacaaggcagactgtttatagcaataagataccacattccagcctgaatctagtatagtatcacctgacagatagcagaccctgaaagaaatcaaagtattttatctcaaattatggttttttgccatatcttggaatagtcctgcaaatctgtctctcatgaggaaaatccacattctgaagagaatccctttccttttccaggcctctttcctgatccagaagaaaatcaactctgataagaaacatttacaatctattctctctgaagcctgctacctggaggcttcttctgcataatgggaaccctggtttccacaaccccttatcttgacccagacattcccttctattcattctaggtctttagactataacttgactctttcatccaattagaaaatctttgaagctgtccgggcatagtggctcatgcctgtaatcccagcactttgggaggctgaggcgggcagatcacccgaggtcaggagttcgagacaagcctggccaacatgttgaaaccctatttctactaaaaatacaaaaaaaaaatgagctaggcgtggtggtgggtgcctgtaatctcagctactttgaaggctaaggcagaatcacttgaaccccggagacagaggttgcaatgagccgagatcgcaccattgcactccagcctgggtgacaagagtgaaattctatctcaaaaaaaaaaaaaaaaaagagagagaaggaaagaaaatcttagaagcccctcacaccttgccacttcaaattgtccccccttttcaaatcaaaccaatatacatcttacatatattgattgatgtcttatatctccctaaaatgtgtaaaaccaagttgtaacccaaccatgtaaggcacatgttcttaagatctcttgagggatgtgtctcaggctactggtcattcacatttggctcagtctaaatctcttcaaatattaagagtttgactctttgacaactaatacatatatattttaataaccactatgtgccaggaactgtgcttcatatatattattgtgtaattctcagagtaattcccatgacataactatagtacatctgttttaaagatagagaaactgaggctcaaaaagactaagtattttgtaaatattctaagactggaaataatatttgatttcaagattttcttattccaaaatgtgttctgatctgctgctctaccccatctctactaaaaatacaaaaattagctgggtgcagtggtgcacacctgtaatcccagctacttgggatactgaggtaggagaatcacttgaattcaggaggcagaggttgcagtgagctgagattgcaccactgccctccagcctgggtgacagagcaaaaatctgtctcaaaaataaataaatacgtaaatataaaattaaattaactcttgcttgtctcatgacaggtaaagatgatgggacagtggctgcctatcttcagataaaataaaggtaatctccacattaacattactagcagtggttcctgctctcttctttcttttttttctttgcatccagattcaattcctaaattactcccagtatgacagtgatttctactgtgtttctccttcactctctgcagatcattgaagaggtagctgcaaatgcctttcacttgcatggcttttccaaaatgtattcagattggctgaatttctgaatcaaatacaatttattttctctcttatcctagcagaagatttaagcaaagagatatgtaaaatatattaaaaaatttttaagtttccttttttttttttgaggcagggtcttgctctgtctcccaggctggactgcagtgatgtgaacatagctcactgcagcctcaacctcctgggctcaagtgatcctcctgccttggcctcccaaagtgctgggactacaggtgtgaatcactgtgcccagcttatttattctttctttttttttgtacccattaactatcctacctctctttgtcccaactgcccttttcagcctcttgtaaccatccttctattccctattctcatgagttcaatcattttgatgtttagatcaatatgggacttatatttttaagcattttgatttaattttcatccgttggccaagcttggtgttctgcatttgcaaattttgttagggtacagggtagtcatggctgcaatctggagaaaataatattcaagatagtgttccaggacttattattatcatttcttactggtccattggctgagttggaataccagctaatttattagatataccctatgcttccattgtgcaaacctcagcctatacttggctacattctcttgtaaacattttcaagctttttaaaaaaattccaaggttaaatttgagttgtagaaaagaaatatgaataatggccatcataattattccattataaaaacacatacacacactcaataaaatgtgttgttttaaaattattaccctaaggcaagtggtgaatagatccaataaaaataaaagaaatagaatgaataagaagataataagacgaatggaagactacattctttctactgactggtcatcggtttttctaaatcttggtcctttatctccaatgggtctttgaggacaagcacatcttatgtactttgtaaatatttgctgtttatgcacattttgagtatcattgtttagctttgcttttcagatgcatgaaacaagtaaatttgaggcagcaaatgagtaatttgtaaatctagacacaatgagaaggcaattaagaatgctgcttgatgaaaaagaataagagaataatgttgtaggtaagggacaaactaatttcactaatagtggctttatatacagtccagtatgtgaaaatacttaagtaattaacattaacattcacactgtcatcctaggtagtgataagatactggcgaccacacacaaaaatggaatagatatctgtgtctgtaaaactaaaaactcttcaagggagaaaaagctctagtgaaaaatggaattcaccaggaagtcactcaagagaatgcaagtattaaaagcactttattataagataaggatgtcccattcttaaaataatctcctagggaaggcttcaaggatagcattatactaagtagagaagttgtctgacaaataggtaagtataaaaatcagagaacctacagaaaacaaatcattctttgagttgcatgaactttaggaaagagtctttatcagccatgatcaaataaattggacaggtcatataacaagttagaagttgccaaaatttttttatagaagaaacagatgtcatcttcttttgtaaactacatcctgaacatatcccatcctgactgcttcgtggcgtatataaactcccactccacccccttttccccgtctcaagcaagctgacctaccaagctgtgtatttttaatcactttctatagcaatcaagaatttgccatcagagaaactgcttcactgcgtcttatctttccatgcctgttcttgctaaacagatttaagataagagcaactggcagtaagtgcccttcctgaaaacagaggtcacagatgtttctactgaagcccagtaaatggttttgggagacatttgaaatcttagtcatattcaaatcccaaatacaatttctcttttttttcccagaaatttcaaaggttttagaaatattttctactggaaaggtatctctcattcttactcaaaatttagacactaatgagtagatggcaagtcttgtttataagcattaatcatgaagatgaacatttataactgaaaaaagatgttcgaattttggggtttgtaaaagaactaggaatggagaacatttagagttcactatgtggtgatattcacaaaagcaaatgatgatataactatgtcacttggaaggagcttcaggcaggttctttctcttctacatgtaacatgtaagcctgttttggggtcattgctgaggaaaactacttcttaagacaattttacgactgcattgtttcaatagtacaccaaactatgttggaaagttatgacctagaatctgaaaaagaaaaaagtgatgaaggaataatgaaaggctgcatgacagaagtatttagtcttcattcctgtgtttgaagcagaaaaaaaggtattgagggctaaccagactctgccttttgctaaattgaagagtatcacatcaaaggccaaagatccattttaacaggtgccttaaaaagttgtactaaatgatctctgtgcccctttggatcatgaattgtctacataactgcacaacgaatgaacgtaagaaaaatgaattggctggtgaagcctgtctggtaaacaatccatgatcctgagggaattgtagttttgcaaaatattcagcaactactttagtttaaatattttatatgactcattgaagctccaggaagatactactttcttctcaatatcagttcctggttattgtcatcattcctttatcagagtttgtttccttgtcaaatgaactcttaatacatgtatctatcactgacaattttgtagaaaggtcattatctgttctgtttcccactccatgaaacggaacttattccattcaacttcgtgtaaagtcttttcaaatgacacaactgtaattaggaaagatgtcaataactatttacagatatttatgttgtattcagaactgtactagttagagtgtgtggtttaaaaatttaaaaaaaaagtgggtgagatggtgagacttaactaccctattacaccactactaggatggtaagaatttagtaagtaaaccagaaagttattagaaaaacaagtaggagcaaaataagctctgtggcattgaactaagaataaaatgtgaagagaaggggtgagctctattatctacttagggatgccttcagtagaaaatgggacttaaaaatgggcaaaacttaggagggtctttccaggaatgagaatgaacagatcctgggataagttaataaggttggatttattaatcacctgagattctcttttttgattattgggtcatcttgtacacatcaactctgattacaaagtaattagtaatcaataattatttctgcatgtgccactggataaccattcaatacgtaaaaatatttaggtgaaaactttgcttgccaaagtttcaaaagttaaatacttaccaggctattatcactatagaaaacaaaggatgagacgttactatgaaaaggatgggtacaaaagtcatttgaagaagaaacgtactaataaaaatatatttcttaagtactttagtctgcaagtggcataattatttgtgtgcaatatccagaaatacatgcttcttggtgggttttaacagacatatttttacaattaaaaagtatatgcctaatttatgttgtggcagattacatttttcaaagacagttacactgataaatcccaacccacatggccatgttataggtgatgttgacactcctccattgggaggtatggaccagttttagtgactcactttcgtccaatagaacgtaacaggaataatgctacagtccaggtcataaaagggagtagaacttctaccttgttctccctctcatgatgttagaccttggaacacagccacatattgtgagaaagcccaaactaccccatgtagagaaatcacatggaaaggcccacagagagaggaactggggatccagctgatatttagcatcaattgcaaaatgtgagtgaaggaggcttcagatgattctggcctagagccttcaacttttttttttttttttttgagatggaatctcactctgttgcccaggctgaagtgcagtggcgcaatctcggctcactgcaagctctgcctcccgggttcacgccattctcctgcctcagcctcccgagtagctgggactacaggcgtccactaccatgcctggctattttttttgtatttttagtagagacgggatttcattgtgttagccaggttggtcttgatctcctgacctcgtgatcctcctgcctcggcctcccaaagtgttgggattacagacgtgagccaccgcgcccggccgagccttcaacttgattcttccatgagaggccctaaacatcatggcaaagagtctaaccatctccattgtgctctgtctcagttcctgacccacagaatctactagcatagcacctctaagttattgagtaatttttagatagacaataacaagataatatgtcaatctggttttcatatctaaatttatactggctccagatattcacttaagattttatcttggccaggcatggtggatcacgcgtgtaatcccagcccttcgggaggccgaggtgggcagatcacttgaggtcaggagttcaagaccagcctgaccaacatagggaaaccccgtttctactaaaaatacaaaaattagccaggcgtggtgatgtgcgcctgtaatcccagctacttgggaggctgagggaggaggatcatttgaaccctgcagaggatgtggtgagttgagatcacaccactgcactccagcctgggtgacaagaatgaaactctgtctcaaaacaaaaaaaaatttctctctaatatacaaataatatcactttcaaaaatgtatctgctcttctaaaaactcagtttccaaatagtgggctagtcattttgccaaattttagaaaacagttttaaaaaatcacacgtagctccaaatgtggtgcactttccttggttttgttcagtgctcaatacattgatgttgctaaaggccatatcagtgccctccgaccatggaagtttggccataactagttcaagccctgaagaactgaccctgggagtcaatccatatgctgctttgtcccaccaagaagaatctctcttctaagattttgaactaagagattgagagttagagagtagctatcgctgaagctgtcaagatcatctagacttgtaccatctcatgccagtcagatgactgttattaaaaagtcaaaaaataacagatgctggtgaggctacagataaaagagcatacaaattcactgctgcttggaatgtaaattacctcagctactgtggaaagcagttagtcagtttctcaaagaacatttgacctggcaatcctattattaggtatatacccaaaggagtataaatcattctaccataaagacacacgcatgcatatgttcatcgcagcagtgttcacaatagcaaagacatggaatcaacctaaatgctcaccaacagtagactggataaaggaaatgcggtacatatacatcatcaaatactatgcagtcattaaaaagaacaagatcatgcccagtgcaggaacatgtaaggaactggaggccattattctaagcaaactaacactgaaacagaaaaccaaatgctgaatgttcccacttataagttggaggtaaacactgagtacacctggatacaagggaacagtagacactgaggcctactggagggtgggaggaaggtgaggatcaaaaaactacctatcaaatactatgcttatcaactgggtgatgaaataatctgtacaccaaacccccataacatggaatttacctatataacaaacctgcacatgtatccctgaacccaaaataaagtttttttaaaaaaaaataagatcatctagacttgggtaggtggccattgtggacatcatacaagcagaagaagctgatctatggagaagacccataggacagtagtattgagaaagcatagagtcccagagagagacaatccagtttccacagccttgactaatattattgctttataattctgtaaaatttcctctgaagccttccagtaagctccttttccacaaacaagcctgtttgactagcttcttaatattaaaaccaaataatttctcaggtggcaataagggggaagtggagtgcattggtcacacaaaagacaacaacatgaaaatcttaattgttttcagtgtcaaacacttgagtttctggagacaaaactccctcttctaagaaaatcaaactattatacatgataattgtcactttgttagttaagacacatttatacaacattttaagatttggagggtagatactttattaataggtggtatggttctgttcttaagttatgtttctgatttttagatagatcattccctgtttctgtttgtgggaaaaatggctgtctcagtaggctgcattataaactcagttggaaaaaactggtttatttgttgaatgagaacttcatttattttgtgtaaatgagcaccactttttattattcacaggttattgacaagcataatattaagttaagatgcttgacattaaaggattaacatgtacaaatttgaaaaacaacagccgcctagtagacactcagaatttctgttcattgatcaactaagcataatatctctgctctttagcaagtggtttaaaaaattgatggttattagtagtataaatcttggaaaatttgcagagaaaatataatttgtctattctaagtatgttaaatggtttaaatgatatgttaaatagtttaaatgatgaatagcgtgaacaatattagctatactgtattagccattagccttgtaacaaattactcccaaacttaccagcttaaaataacaagcatttattaactcagtttctatgggtcaggaatccaacaacagcttcatggaatgaccccaactcaaggtctcccatgtgactgtcatctagctgttggccaaagctgccattttaaagacatgaatgaaacaggattatccacttccaagctcactgtgtggctgttgtcaggaagctttagctccttaccacgtgggattctccatgtggctatttacgacatggcttccctcagagcatgtgacacaaatgatcagagaaagatctaggtgcatggcctcatctcagaaatgaaaatccttcagttttattgtatcaacacaggtacgatgtaggagggacaatacagtgtgtggaagctggagatggagatccttgggagctgagttggaggctgctaccatagctatatctcttgctagagttcccgattttgcagcctgccatcacctcacctaagactgaacagaatcactgcctagatttacaatatcccagtatattctttttcatgtgcactctcactttacatctcaattttcattccgagcagtacttttaagaaagaattatcttcccctttaatgtgaggaaaaactcccctgtgtataaaaacaaaataatcattcaccatctctttctagtgtgtgacatgcagtgagatttaacttcattgctttgttagaatattctgttctctgtggagggccgtgtttttaaaaaatcactcttcagtttctgctgcaaaaataaaataaaattctctgtgaagtttgtcaagtgaaatggacacaaacatggctcaaagtctagaggaaataaaatgaagccacaatctcagtctatgaaaaagagataagttaggataaaactacagcaaaaaatgtacaggaaaagaatgctgctctttaggagagaaatcagaaaagtcagaagataaaatacagagcaaaaagtttactgatcccaacagagaaacaagaaacctcagagcacttatatgcaaagtatttgcggtgttttggggcccactgactgtaagggaaaccaggtatacacagctttagggcacaatggagagaaagctcttgatatactctcctgagtctcataaacagcaacatcctccaacgtaaatgacagtgaaagaatatgatgaactcctgatgggttgatgccacaggaggatccagccttatttttcctcagctctttcctcaaggaaaagactgggaattgataatactaaattgacaagtccaaataagccttcaggcaaagcagatgatccttttttttttttttttttaagtatccaaaccagtctcagatttcttcagccagaaagcatgtttttgcaggctttttacaaatcctaagcaaagttatgtagttctcgagagttatagaaaaccaggtttgcatcttggctctgatacccctccctgtgatactttagaaggcttacctggcctctaaaaacctccatcttctcatatgtaaaacacaaaaaaccctgacacatagtatgtgctttgtaaactgtagctcttgttaatagtgaataggttttgtttgtttgtttttcccaaaagaatttgatgcttgtgttttgaggagttaaaattctcaatgtaatagaagactctataataaacttacgtcttcttagggtgatacgaaaattattaaactcaatccccctttagttgcaaacaatcaatactcaataatttttttgaattgatgaacctctgattgtgtgcaactatcttaattatgtctatattcttggtcttgtgatgaaaagtatccagaaaatgtctactattcatcactgtatgccttcttctttttagcacagagctttgtacatacgaagttctcaactaatgtctgttaatttaaattgaagaagctttagggagttactacaatttaggtctggaactcacatcccattttccttcttttgtcccacccctacccatttcagccatgcatatgtgtatttggagccctggatcttcaaaaaggcagcaaggagctaattaagccattaatgaattaactttattttttgaagtttataacttatttagacttagtgatctttctttgctcattaacacctctccctgtaggcagagagaaaaaagattaaaatgtgactctgtgaattcttaggcccatataaattcctaagtacaggggaaaagcatcgatttgtaagtcaacatgacattagtcagaagtgttggtttttctttatctgcaggatctgtttccaaacatatttgatacccaggacttgaaactacatcaattatttgaggaatcttgttagggctccatttgtatggagaggtaacactcactggtggcagtggtttgtgggtagaaggggccttcgggtatgtgcggcaaccttgtcaccagaagctgacaccaacaatacacactcacatttaaaaaatgccaaaattgtatccatcacctccaaaattttccttatgtgaaaggttttggcaaatccttgccagattttaaatgattcattctacatttgtatttcacagttataaagcagaactttgcacaacaagttaacttgccaaaatattatgtaaatattgccaaaatattatatcatcaaaatattgtataatatctgtgtattactttttgtattatatatttgtattacataatttgtgtatttatttgctgcttatttaatttataaacataacagaaatataagggaaaaaaagccagataaattttccagaatagatgagaaatggagaaatctgagtccttccttcaagttcattgattatgagttgagtaaccatgatatgctagtatcttttcaaatatataattttttgattatataaagataaggttgatcttcatctcagacaattttccagcctagtagaaacaataaacacagttggattgtaacccaaacttcaactgtaggtcatctcacctaagttagtggatatttggtataatgtttagtaaaaagctacactttgtggcccttcatcatagcaaatattggctttattggcctttaatatcccaaataagaattatcaagaaaataggctccattttcattattaagtatttcagagaaataaaacaataatactgccttaccattgtaggtcattttatagtttccaagggttttcaactatatctttttttaaaaatttgaactttataacatccctttacagagaagacattttacagaggaagacactgagcatcagggacattcagtgactgctggctggtaggcagcagaggtcttgaccagacccctggcttaatcttcagagttcttccatgctgatgcatggaagacttgcccaaggaagttgtctccatatgaaacagccttgaaaataagatgactttcagtctagtttgatcaacatttatgtaaacatgtaattaaaaattgtttgcttcaactcaacagtatgtctctgaatgggaactggttctttctcaggaatattcttggctgaatgtgtctgtgctgtgtcatatgcctcctctttacatatgactgtgggagggtgtggctgtttctataaacactgaaaacagacctgtggctaacaaaggattgtgggtggcagttgcttttagaaaccttggtgaaacttttcaaaagaatgtttcctatcaagcggtgcgttgtacatgtgggagaatccctgacagcacgttgctcttcctggagctccgtgagcatttattcccagtaatgtcctttggtgcttctttccttcatcccttaacgaacctaatccactctagccactcttcgtgatgtgaggtcaagagggtgaacatggcagatgtggcatttatgcgattacattctggtggaagaaaatgggccattaaaatgcaaaccaaaaatcaatgatctgattaattgcagattgtgataactgtaagaaagaaacagagtgccctgataaaaattaagtacgctgacttatttccatagggtttctgagaagatcttcactctggggaaacaatatttaagctgcgagctaaaggatgacgatgacacataggaaagaatgttccaggctacaagaccaatcagaacagaagccatgaggcgggaagaagctacatgtctctaacttctagtcagtatgaccagagtgtagattgagacagacatgcagcatagaatggaatgagatgaaaatggagacagaggcgggatctagaatatgctatatcttgagtcttctaaaatgtgtccagcgtctgttctcagtgcaacaataaactatcaaagagttttaagcagggctatgagtttatctgacatctgttttaagaggtcattctattttatatgagtggaagagacatgaaaaagaccagttagaaggctaccagaacagtccagcagagagatgatgttgggagcaaataaagaattccactgtggaaatgtcacatttgagatgcccaagagacatctcagtagaagatttcaagcatccattgtatataaaaggctagagctcaaaggagaagtctgggtcagagatagatatttcagagttttgaacatatatgtgatacgtaaacaggaatacagattaagaataggggataggatcaaaccttgagaaattcgaatttttaagataagatatggaataaaaagataaaactgtgaaggaaagtcagcaatgtgaagggaagagcaagagtgtggagttgtcaaagagaagaggatctcttgagaagaaaggagtgtttgatttgaatgctgctgagaagtcaatacaaagaaggcaggttttacaacaggaccagcctcataattagtgcatctttcaaggagtgtgaagtactttcttcactgatttctgacattccgatttgtcttactttacttcattgcaccaggaggaatttgaagatccatccaagttgtcagccatgaaaacaaaagtgcagcacgtgagccccagctgtgctcctacctccttggtttggtttccatgagtagttaagcttagaaaaattgtgaagaaacttgttgtgtgggagcgatttttcaaagacctacaaacagaagtaccacttgacccagcaatcctaaacttgtatatatacccaaaagaatatgaatcattctatcataaagacaaatgcatgtgtatgtttattgcagcactattcagaacagcaaagatgtggaatcaatctaaatgctcaccaaccgtagactggataaagaaaatgtggtacatatacactactgaatactgtgcagctgtaaaaaagaacaggatcatctccttggcaggaacatggatggagctggaggccattgaccttaccaaactattgcaggaacagaaaactaaatacctcatgttctcacttataagtgggagcgaaatgatgagaccacatgggcacatagaggggagcaacagactctgggtcttaccagatggaggagggagagaatcaagcaaaataactaatgggtactaggcttaatacattgggtgacaaaataatctgtacaatgaaaccccatgacatgagtttacctaaacaacaaacctgcacatgtacctctgaacttaaaaaagaaactttttctgtatcttaggatcatgagaaagaatcacgttcaaagagtaacaaaattgatattatatttagacagggaatgggattgcaagtgaagaatctgtggaatctcttgatttgtgaagatttcttttagagttcagtaatggatctgtgacatccaatttttctagttaaagagaaagagcattgaactaagaatcagagacttggtttgcagtcccggattcattggttattggttgcttaaacttgggcatgtcacttaaccattctgacccctaatttccttatctgaaaatggtaaaaatcatacctacctgatagacttgttgtgagtgttaaaatgatgtggcttaaaacctagaggaggcattcaattaatgataccttatttttattaatattagcatattgggagtaagcacagggccaaatgcaatcatgtatagaaaagcattccgctaactataaaacattgaataaaatgcgctgatgtgtttatgattgataactgttttttgtcagctttttaattttagctgcaccatcttactttttggtacagatctatttactatctaggagttgtgggggacttggtgggtagccagaaaagatgacagctagcagagcttaggcacaggagcagatgtaagtgcaggtggctggcagtgtggggaccctggaagcagctgctctcagggtaaaatccacgggaggactaggcagggtgagagagcatccccaggcaaagtagagtgacctgcctctgagagtttgggtgtagaatgcagcaggatgactcagaaaagtctgcagagctttagaaatgcttttttttttttttttttttttgatgtggtgtaaggttagaagactagaatgacgtttgtctattattcaggagatgttctttgtaggagaaagaaagggaaaaagaaaaagattccaaatattttagtgggcattatgtagttccgtctcttgctccttcccttaattccccctccagaggggaaacagatatctgtgaaactgaaaagcttgcatctttgtgagatctgctggagggaagctaccgtttaaacccagtctccattattttaaatggttttaagcctcacatgtagtgctatttatttttccttctaaaaaatatttctgggttatgcctccatatacaaaactcacctttgtgccattgtgctgttttgatgataggtaatttagctagatttagctaccatctattgagcacttaaaattaatctctgtaataaactctattcaggcatttcatcatttaatttaatacaaaccctgtagaaagtggatatcactcctcttttgctaattgggcactgaggtttaaagaggttaagttaatttctcagtttgctatagctagaatggaataggtccattatttcaatataggtttgccagactccaaagcatgtactggaactactgtggtataaaacaatatccactccttagaaagatcagcatattcatcttctatgtcctatttataagtgaaccggtgtgctcttccctctttattgagatttttttcaaagtaggaaaaagggaaggaaaaagcatttattgaccacatgccatatgccatatttctttacaaatattttcccatcattcttagaaataaaccccaaatgaatatttttgtccatgtctttcaaatgaggagattgcttagagaagttgaggagttcgtcaaaatccaccatgcttatttattttcttttcatcttacatttttacatatctagtgattgtcagatactgagttatccagggttaaacagaagttacagtctgtgttaccaagggcctcgtagattactggagaagacaaagatgcaaataggcaattataataaaaaatgctacacagacagacaggaatatattcaagtcactcttaggcgcttctcctcccaaaacttaatcccccacttccattacgccatggtgccttccagaattagcgcagtttgcatactgaaggaaactgaggggtggtcagaaacccagtttgtgcaggaaaaaaaattgtggagatcaaaattagcttcagtttttaatatcagccattaattctgaggaacaacttcatccacttaacttgattttccatcttccttgagtcccaaggcaaaactgaaatggaaaagaatctacaggatgctttcatttagcaaagaggcaaacaaacccaaatcgagcagtacatcatagcaacccactaattggaagtctgggtaaaacatctctcatcccatttctaagaacttagctatttatccaaagcaagacctcttgccccctggagctctattccccaaagagaagacttctttaaagagatcgtccttcttagaaaaggagatttttctttcccattcagatatttctagattggttcacgtggatagagaattctatgccttttttagccactgtgactcagatataattcattttgccttaaaacgcaaagcatcagtaaacattgttagcattgttatgtcacccttttttttttttggttgttcacaaattttctttgttaaaatcctgtgcagctttttgaattcacactaaagaactttaaatttccaaatgaagaaatttcctggccagtttttggttttttttttttgaagatgactgctgcctgagtgtcaacatttgagaaaatatagaatttaatttttggaagtcactagatatagcaacctgcctggtgccagagaagagctgtctatgctgtactgcaatttgacttttaatccatcgtagatctgctaatggtatggcacatgtgaagtggtaaattcttgagtgtttgagacaaacattttaaggtacccatacataatgttaagttcacgtttaggaaagtagtaccagttaataagattacttatttgaaaataagaccagtttatttcaatctggatattcgaattatcaaataatctttttttttcaggattttcttggtgtatgttacctttttagtgaaggaccagtgtctcagagctttattttttatggtagtttaattatttaactgaaacctggaagaattaatagggtcagaattttagatcatgaaacatattttattgctcagtggatgatattcttcttggtattatttgctcttccccagagtcaccatatggtataaattattttaaattcccacaattatcagttatgtatatactaataatatcaaaatcatttgtttgggacattttttgtaatttattgaattttcaaagtcaattttgttcagaccattttttttttacaaagtagcttaaaggcacttagaaactgacagtattggatatttcatacgattttttagaattgcagtatctgccatttatctgaggactggtgattcaaaaactctgtttttggttaattttaattaaaaacatgtccactcaaaatactgctcaatacccaaatcattgcctaccttgtatatagttatttttcctaagggcaaaatagctaagaccataaattacgatggcaggcacatggtttgctgacagaactatataaaatactgttttcatcctcatgtcagctctggtacatgcctctttactttaattccttggggaatctgttgtaagttatagttttaaaaaacatccctaccccactagctctgtcagcttacctttttctgactgaccattttatttctctgaaagaacagatagaaactgagttatgtcttagctgaacttgtagtgccctaaatattaatagctgtgaaccagtttagtttaatttggatatttcccaatcttacacctgcgatattgcaaggtagttataaaaagtacacagaattcatctctataaatatatgctcattttatatcctttacaatctgtttcctagattcctaatccaaagaggccattagtaccaatgacatgatggatagagtaggttataatgtttagcagctcattggagatgacatagtttgccaagttaatttacacattttcatactacatatattatgtacaatattttttgtatggtgggttttcatcgagtacccttctctcttgtaagaaattattttttaagaaacatgttaaagagtaaagatgttttaaataagcatttctcaaatggttggtccttactaccaagcatattctggaactgacactttagttttacttacttccagcacatttcatgggaaatggagatgtccaaggaaacaggaagacgttaattgatgatacattttcttctaatattttgatatcccccaaagaaaaaaatagtccaggagatagattatactagaacagtttggctacattatctaaaagtatgttcccatggaaaattatataataggcttagtacattttagaccatttttttcattttctttttttttattattatactttaagttttagggtatatgtgcacaatgtgcaggttagttacgtatgtatacatgtgacatgctggtgcgctgcacccactaactcgtcatctagcattaggtatatctcccaatgctatccctccccctaccccacaacagtccccagagtgtgatgttccccttcctgtgtccctgtgttctcattgttcaattcccacctatgagtgagaatatgcggtgtttggttttttgttcttgcaatagtttactgagaatgatgatttccaatttcatccacgtccctataaaggacatgaactcatccttttttatggctgcatagtaatccatggtgtataggtgccacattttcttaatccagtctatcattgttggacatttgggttggttccaagtctttgctattgtgaatagtgctgcaataaacacatgtgtgcatgtgtctttatagcagcatgatttataatcctttgggtatatacccagtaatgggatggctgggtcaaatggtatttctagttctagatccctgaggaatcgccacactgacttccacaatggttgaactagtttacagtcccaccaacaatgtaaaagtgttcctatttcttcacatcctctccagcacctgttctttcctgactttttaatgattgccattgtaactggtgtgagatggtatctcattgtggttttgatttgcatttctctgatggccagtgatggcaagcattttttcatgtgttttttggctgcataaatgtcttcttttgagaagtgtctgttcatgtccttcgcccactttttgatgtggttgtttgtttttttcttgtaaatttatttgagttcattgtagattctggatattagccctttgtcagatgaataggttgcgaaaattttctcccattttgtaggttgcctgttcactctgacggtagtttcttttgctgtgcagaagctctttagtttaattagatcccatttgtcaattttggcttttgttgacattgcttttggtgttttagacatgaagttcttgcccatgcctatgtcctgaatggtaatgcctaggttttcttctacggtttttatggctttaggtctaacgtttaggtctttaatccatcttgaattgatttttgtataaggtgtaaggaagggatccagtttcagctttctccatatggctagccagttttcccagcaccatttattaaatagggaatcctttccccattgcttgtttttctcaggtttgtcaaagatcagatagttgtagatatgcggcgttatttctgagggctctgttctgttccattggtctatatctctgttttggtaccagtaccatgctgttttggttactgtagccttgtagtatagttggaagtcaggtaacgtgatgcctccagctttgttcttttggcttaggatggacttggcgatgcagactcttttttggttccatatgaactttaaagtagttttttccaattctgtgaagaaagtcattggtatcttgatggggatggcattgaatctataaattaccttgggcagtatggccattttcatgatattgactcttcctacccatgagcatggaatgttcttccatttgtttgtaacctctttaatttcattgagcagtggtttgtagttctccttgaagaggtccttcacatcccttgtaagttggattcctaggtattttattttctctgaagcagttgtgaatgggagttcactcatgatttggctctctgtctgttattggtgtataagaatgcttgtgatttttgtacattgattttgtatcctgagactttgctgaagttgcttatcagcttaaggagattttgggctgagacagtggggttttctagatatacaatcatgtcatctgcaaacagggacaatttgacttcctcttttcctaattgaataccctttatttcctctcctgcctaattgccctagccagaacttccaacagtatgttgaatagtagtggtgagagagggcatccctgtcttgtgcaagttttcaaagggaatgcttccagtttttgcccattcagtatgatattggctgtgggtttgtcatagatagctcttattattttgaaatatgtcccatcgatacctaatttgttgagagtttttagcatgaagagttgttgaattttgtcaaaggccttttctgcatctattgagataatcatgtggtatttgtctttggctctgtttatatgctggattacatttattgatttgcgtgtattgaaccagccttgcatcccagggatgaagcccacttgatcatggtggataagctttttgatgtgctgctggattcgttttgccagtattttattgaggatttttgcatcaatgttcatcaaggatattggtctaaaattctcttttttgtttgtgtctctgtccggctttggtatcaggatgatgttggcctcataaaatgagttagggaggattccctctttttctattaattggaatagtttcagaaggaatggtaccagttcctccttgtacctctggtagaattcggctgtgaatccatctggtcctggactctttttggttggtaagctattgattattgccacaatttcagcttctgttattggtgtattcagagattcaacttcctcctggtttagtcttgggagagtgtatgtgtcgaggaatttatccatttcttctagattttctagtttatttgcatagaggtgtttgtagtattatctgatggtagtttgtatttctgtgggatcagtggtgatatcccctttatcattttttattgcgtctatttgattcttctctctttttttctttattagtcttgctagcagtctatcaattttgttgatcctttcaaaaaaccaggtcctggattcattgatttttttgaagggttttttgtgtctctatttccttccgttctgctctgatcttagttatttcttgccttctgctagcttttgaatgtgttttcatctaaatatttgttatattttttgatgaagggcaaaacattttggttacagtttctttgaatatttcattccacttacgcttttcaaccaaatacaataaaaaaagcaagaaggggttgtcattcttttttttttttcatttgttcttcaatttagcattgaaatattaaatccaaaagacaactacctttagtatgagattgtatattttgaaaatgtgcagaggtttaggtattttataatagtgacaatttacatatttataggaaatatagtttcaaatagattttaaggaggcagctgttaaaatttgacatattactgaaacttaattagtaatatcgaaatatttcagataacacagggatgactgagctaacctgattcaacacatcagttcacaatgttgtgaagaacacattgaacattttcatggaacaatgcattctgctgcttacttcaagaattaggaaggtgaataagatgattcttactctcaaagagcttataatttagtagaagaaagacaataagtctgtgtgcccatacatttattaatacaaggtgggtccgggtcatatcttataatttgtactaagtgtcatggggtagaagagaaaaaaacatttaatgtgatttgaaattgagaatgtttgtgtggatatgtattttatataagatacttataaaaaactaaatgcatcaacccacagattttttgtcttatggcctctgttagaatggtagaatgggaagaactatttgggttgttatatacacaggcctagttattattcccttgagtaaaatagggctttgttacagctaacctaataagaatatttcagtaatcaaatatttaaggaacattgttgaggtggcatggaaagtcaacacaaaaaaggaattccacttgagctgtaattttgttttatttgcttagcgtagattagaattgtgatacttgtactgttagttgcactgtacataaatattttgaattactgtcgctgattggaactaccttcgtgctttaaattaaaaaaaaaagatgtatctgtacattctaaatagtaaaaactctttttggctcaaatcttttaattctgaaggaatatactggcagatacttagtagacataaataatcattaatgcatgtatggtgtatttcattcagtagtaccaaaatctaaaacacattgagttgtctggcatggtttcattgccaaaagttgtgatgtgactctgatgtaacctggtttgttctgaacaactccaaatggttcttcagacttgcccaggatccatctggctcctgggaagccttatgttatcatggctataatcccagactctggtgacagtctgcctgggttcaaatccaggctctggtactcactatctgtatgaccttgaggatgttggtttgtctgtttcccttgcaaaataatgaacattatattccctatctcaaagggttgttgtgaggatactctaagataatgcaggtaaaagtgggatgttaacagcatttggtaagttgtaaggactcaggtgctggctatgtaaaaataaacttttttaagatggatagatacatagatagatagatagataggtagatagatagatagatagatagatagatagatagatagatataaaaacctatacctgaaaacattattttcataatatttcaaaagcttctattgtactatctatgcttttatacatagtaaaagcagatgacatgctggtcctactaaatttacaggttaatttttagatagttactaagaaatcaaactgtgtggaattttctggtacaaaattacaatatgcaataccttcctactgaggtacccattactgaatatttcttttctatcatatgtgaaatgcatcaattttaaatatttggagacatacctaatttaagtgaaaatctcggtatttcctgaaagtcgccacactataacagataaccaatcaaatttgtctagcttataatgtctgtcagcctgggtgatgtggatgggccactgtgttctcaactgcactgtctcagtgattggagccagttcatgaagcgctacagcctgtaggatgccaaggaggttctttttcgtaatcacacacaagcaatgtggtaaaaccctcaagggatagcagttgctttcacaatctatttacacacatacacacacatacacacacacacacacacacacagagttctttgttattttacatctggcaacaggaagagcatgctggacagacctctggcatcataaaccatccttccctctgacctctgtgtgaatcagcagactatgatctctgcagaatttaggattaattgcagcaaagaaaaagaacctctctgaaatctaaaatgtagacttggtcattagttcattttgcatgctgtggaaactatatttggcatcattaacagctgcttccatgagatgttgagcactaaaatatgattggtgaacactcaggattttattttgtggtattggttgcaattatggagatgttgatagatcaatttccacatcatctaaacccttaactaagaaataaagtggtacataatatgcatgtcccctctatatgagactttgttaattttcttaatttaaaaaatttttttaattctatgaaggaaaagaaatttctctttcagctgatgtttccctgaacacacattgtgatcatttactatttcctaagtgattcaagcagcaatcttgttttagaatatttcaactgaaatgccagccctggaatttcagtgctgattttaggaattattctaatgacttcttgacaagctttacctacatcaggagcaagtgaacttggcagagttgggataggagacttgcctccaaaatgttaacttatatataaccaccttgttatcgcattagttgttttcatggtggctgtggtggtcaatagcagaggcaatggaatgagctgtaataagagtcagcaaatctgagtggacttggcttctcccgtttgccatggtgtaaatatccccaccatgattgttttcaggctaccaacatgatgtcactaaatgtggaattgagaagggatgtccaaaatatacatcaataaatcagccctcatttgattttcttctcagtgaactatgtggttaaatgacttttatctacctttatctcgccattagcaggagacattatggaaaaatataatgccataaagtcacctctatgtcattgtccttgttagaataaaaattaagacctctaggtttacttttatgggttgagcctttgacctatctgtggaagtggtaagctggaacaacaaagaggaaaatgagagtctgtgcttttaggcaggtagttaatgaaggaccaggtaggaatgaagaagccaagttctagtccaaattgccattgattatctagaagattttggacaattcacttcatgcagtagctcaacatccatcaaagagtttttgaaagtctattatgtgccaggtgttggaagatgtgaaggtgaacaagcagatgatttcaccttaaaagagcttgtagcttagtgggaaggaggaaaaaaaaggaagtaataataacaaagtaagaaaagagctagcatagagctggggaagcaaaacacacagaatgaaagtggaacctgatcttgcagagtcctggaagggttctgggaagagatgactgtgtgctgagcaaggaagaatgaatagaaagtaggcaagaaggaagggtgagatgagaggcttcttgatttgattccagatctcaggttttatttcaccgttaagtatgatgttttagtctctcttttcttttttagaaaccttcactatgttaaaaaacagtttttttctattttttaattggcaaatagttttttttaaatcacaagtaagtattgtgtaattgtgtcagatttttttctgcacctattaaaataattgtataggttttcctttattctttaatgaggtgatatcatatcaaatattagaccaatattatgtatctgaaaaaatatgcacacacacatataaatgagtgtatttgtgtgtatatgacttttgagaatacattaatgagagagattgtactgtaagttttttctaataatacccttgtgatagcaaggttataatggccacataaaatgcattactaattgctttttatttctctttcttggaagagattgtgtatgattgctgtaatttcttccttacgtatttgggagaattcaccagtgaggccatcttggcctgaatttctattctggaaacgtttaaaattactggttttatttatttaaaagatttagggttcttcagattttacattcttctcatgttaactgtaagttacagtttttctttttttttaatgtgttgttattattttttgtatatgtccatagggtacaagtgcagttttgctacactgatgtattttgcattatggtgaaggcagggccttcagtgcctccatcactggaggaaggcacattgtacccaccaagcaaccttccatcatccactatctcccacccctcacccctctaagtctccattgtccacacattcatgatggacagtgtgcactctgcttccatgtgcacacattatttagctcccatttataagtgagaacatgcagtatgtgtctttccatgtctgaattattacacttaagataatggcctccagctccatctttgttgcaagttggtgtttttcaaaaaatttccttatttgggttgggcacagtggctcacgcctgtagtcccaacactttggtaggccaaggtgggcagatcacaagatcaggagttcgagaccagcctgaccaatatggtgaaaccctgtctctactgaaaaaaaaaaaaatctaaccgggcgtagtggtgcacgcctgtagtcccagttactcaggaggctgaggcaggtcgcttgaacccaggaggcagaggttgcagtgagctgagattgctccactgaactccagcctgggcaatacagggagactccatctcaaaaaaaaaaaaaattgcttatccattttattcaaattgtcaacttcattgacataaagttactgttcttatctttttgacatctgtaggatctctatcaatatcccttttgtttttatacctgatattggtcattcgtgctgtagtttttttcctcaataaggcttgttaagagagttttaattgtattagattttcccaagggcaaattgctggccttgttgatgttctctattgtacacttttttctgttttataaatttgtgccttttttttttcactttttctcatttctatttcctttgggtttgatttttcttttttgactttttgaattagagtatagattattgatattcaactttcttcctttctaatatatgcatgttaggccgtaagtttctctttaatgagtttcagctactttccctaggttttgacatggtattttctatattatttaattcaaaatatattctagcattcattgtaatttttctttaatccaggggttatttaaaaaatatgttgcttaaatttaaatgatttgaagattatgtagttatttttctgtatttgagttctagcttaattctaccgtggtcagagcatatggattgtatgattttggtgctttaaaatgaacttgttttattgcttatcatatggtccaattttgttaaacattcaatttgccctgggaagtaacatgcattttgcttattttaaaagcagtgcattataaatgcaaattaaggcatttatatataatgacatatatatgtgtgtgtgtgtgtatacatatatatgtatacatatatttgcttttgacttgtttcctcagctactgggagaggtatgtcaaaatctcaaactttggttgtgaatgtactattctttataaaatttaaaactgtgttattaggtctataaacattaagaatgtttgtatatttttggtgtaatgacccttttatcagtatttttttcatatttatctctagaaatgctttgaagcctaatttgttattaatatatcaataattgtatttcaaactagattattcaattcatgtaaacccgatgtagttaatactttatgacaaatttatcgtgcttgagtttggtcaggattctcaattctatatttgatgtcttttatcaagttttgtaaatacttggcctggatatactcaaatatttcttttatctcaatctttatctctccatagcttttgggattctaattacttgtgtcttattcctttatgtcatgtctttatgttcttttctaccatttttatttttttctcaatgttttcatccagaaatttttctgacctattttcttattaattaatcttcttcttctgtgtcaattctgctatgaagcccgtccactaggttttaaattcaattatagaactttctgttcaaaaatttccactttattctttatcattgattttatttcactggtaaaattatctgtctggtcatctttttaaaaagtaatatgaataacagttatttattctaaaatccttatgtaactgtaatatttaaaccatccaccaggtccatttgtgctgagttttctcctggttttcagtcatttgattttgtatgtatgtatgcttggtaattttggattgggtgtcagaaattgtgtatgaataaaatgtaaaggttctggatgatgatctgttatctcagagaggaatgtattttcttcaggaaggaatttaagtacagatagaccagcttgatgcagttagaaagtgagacgattcaaggttttattcctgtcattctgacagcttgttattttcagtttctcctttgtcctaggatacagcccttcagaggtctcaaatgaaagacggggccttttttctttataggtcccaaactccagtttttgtctttcagttccattaaactatggaaagctctgagctactgttttctgttcagcctgtctgccccatcctgcttgtgaataagcagttgcctcaagtgaaataattttcctgctttctggatcttggtctgtcaagttctaactgtcttaatcattcctcagtatcttcaaacatttcccctgcatttatagttgttataagtactagtatgatctaagctattctgttatagctggaagcagaaatgctgccatcgaaagagattaggcattggaataatgtgatctgatttgcattttaaaaagatttttctgaacaacaatatcctcatatgtgcaatgaaacattttgataaaaattgttctctcaggcccttttcagctccaatattctgcaagtcttgagagtactaatagtgtgtcataccatgatttcaagctgtcaaaaccccagggcttttagttttagtaggctaaagttagaaaagcttagactctggggaaaatggccaagaagaagactctcatctttggtgtctttctatgtggcttcatcactgtacttcttgttagctttcagcaacatcctctcttttctgggtcttggtatctgggcacctagactatttttccagtaacctgaccactctctcctcatgtggtggtgccccattccacactctcttctaaaatgtttcatacttgagatttaaaattcactgtccatcctgcatttttctgattttttttagtaataaattaacatttattgggtagttatgtgccagacactgtgctaaacacttagatggaatattttattccatattagctctatgaggtagggacaattattatccccatttacagatgacaaaattgaaagttaggggagtcatgtagcttacctaatgttacagaggtaaagtggctgagatgaattctgatccctggaatgggcatcatttagaggggtggttcccaaaagccagtccacagactgtcttgttctctaatatataaaaaataattcagcaacatctaggagcataaatccagagattctgaatcagtagttcttggatggggcccagaaatctgaatttttttttccttttcaatgattacattttagtttactgtacaatgaaacagagaaaactactttttttttttttttttttttttttttgagacggagtctcgctctgtcgcccaggctggagtgcagtggcgggatctcggctcactgcaagctccgcctccggggttcacgccattctcctgcctcagcctcccaagtagctgggactacaggcgcccgccactacgcccggctaattttttgtatttttagtagagacggggtttcaccgttttagccgggatggtctcgatctcctgacctcgtgatccgcccgcctcggcctcccaaagtgctgggattacaggcgtgagccaccgcgcccggcctacttttttttttaaagatctgagagtgtgaatcttccacctccttttcaaccaaagttgaggaatttgtcctgctataatctcaacccttgagtatttctttttttaaaaaattttattattattattattataatactttaagttttagggtacctgtgcacaacgtgcaggtttgttacatttgtatacatgtgccatgttggtgtgtgcacccattaactcgtcattcagcattaggtatatttaaaaaaaaaaaaaaaaccttgttatctcagtatgtttttattatgcaaatttcctctaaataatgaaagctcctttttaatgttatattatgatagcaaaaggtgtgctctttgtagagttagcaggatatggttgtgtgacaaaaagccaaatagtattttaggctccaatgaagaggaatatctgtgaagggggtctttcttggtatttttgaagttccacttgaaagtgctgttggccatcactaatcatgagggaaatgcaaattaaaatcacaatgacataccaccttaccccccagccagaatggcgattagtgaaaagtcaaaaaacatagattttggcatggatgtggtaaaaaaaaaaaaaaaaaaaaaaaaagatgtttatacactgctggtgggaatgtaaattagtacaatctctatggaaaacaatatggggatttctcaaagaactaaagacagatcaaccattctatccgacaatcccactacttggtatctacccaaagggaaggaagttgctttatcaaaaagacacctgaatgtgtatagaatcatcctaagtgcccatctactgatgagtggataaagaaaatgtggtgcgtgcatgtgtgtgtgtgtataccatgaaatactatatatatatatacacacacacacacacacacaccatgaaatactattcagccatttaaaaagaatgaaataatatcttttgcagcaatttggatagaactagaggccattattctaaataaagtatttcaggaatcaaaaatcagataacacatgttcttacttatgaatgagagctataggtatttaaaggcatccagggtggtataacggacattggagactaagaagcggggaggctgggagtgagggtgagagagaaataactatgcattgggtacaatgtacactacttgggtaataggtacactaaaatcctaagcttcaccaccatacaattcatctctgtaaccagaagccacttgtatccctaaagctattgaaataaaaaaaatcacaaagtgctgttgcctactccacagccatgcaagtttgattctggatctgagacaagctatgatcacattgttgtagagaactgaggtccttggaaaataaaacacaggttcccaaccagaagttaattttattctgctgttaaaatggaactatgacttttcttatttataagaactgtccttcctttttaaggttaaaacatgttattttattataatgcaaataatattcattatttaaaaatagaaaaataagaggcagatgtagttctagctcttaataaacctggctaaacttttacaaatttcatctgatcatttatatacttttctacatgattggacttatttataatttggatttttgaatagtgctttaacattttttacttaaattgtatacattttatagattatctcttgataagcattattttaatgatatatatgtataaataatatatattcttacataatacacacacatgtctatgtaatgacatatatataatattttgcaatggtgcatatgtgcttgttcccttaagatggatatttatttgactgttttcttattgttggattattttgtttcataaataacattctatgctgaaaatatttttaattgctataaattgcccaactaagacatataacttcctgttatcctttcactacctttgataacacactaaatttttctttactatatttcattcccttcttaatctcatttctaaaaactgtatttctgtcttacaatatatatatcattccttcagtactcctacctgttgatcttctcattgttatttactggcttgtcaggtcttggaagataggcttctcatacaacccaagcctgtcttttgacctgactataaatattttattgtttacatcttcccctgcaaagaattcctctaggatctgcccctttcttgttctccaggcagtatgccttggacattctgtagctggctgggactgattccttgccaggtcagtaggacagatgtgtagactaagaaattaactagtgagttcaagtggaggttcctggcctgttggtgcctgtgaacaggattcttttgagtatgattagtgacatgaaggtcctgaataatatcgtaggcagaagaagtgccattactactcacagtgtaagaagtagcttgagttaactggtgaaagagctaaaagtcaatgaaaagtattgaacttttaaaatgtattatctattgaaaagtttaaaagatcatttattgattaaggaaattcctttgactttaatagctgtgagctctaatgggggctagaaactccagcaagtggtacagtttctagaacctagcagataatttttcattgactagaattccatgtgtgatacaatgatttggcaaagtaaatcacaataattattatgttcattgttttctcctttgtttaccttgattaaccatctttggtgattgtttcataattgttgctttctaaacaactttattgaagagctacaaatggctagctcttctcaaccctttaattagtgtctgggatcggtggatgttagttgaggggaaaaggttattttaataatttaagacaaaacaatttagaaattgtatttttttgaagacaacttgctatgtaaccttttataattccctgaatttttctgaaattgatgttttctttagtgtatagcagtgatagcatgaaaccaccactgacttttttagggcaacttgctggctaattttataaaatttgaactgcactatatgaatgaagaatcatctgtagcaattgctcttttccaaatgttcttttgcttcaaatgccgtatctgaatattagattgtttctccagatgttacaggctcatgtttccttctgctgaattcaattgttggttcctgcttatgtttctcaggatttgtatcatttctctgtcttaagtaaggtttttataaatgctcatcaatgttgtagagtttggattcaattcagatagaggctatttccaccggacttttgctcatctacttcctccctggagaatggtgaaaaacagtcctcttttccctcctctgatagggtgatgggctactattgctttctctctcctaatatattgagtacaccgacctctcaccgaaaccttaggtcaaagtgagaagaggtgattgtttttaattggatgattgctaccatatacttctcttttggtgggatcccaaaataaataaataaataaatgacactccccccaaaaaagaggaactaaaaaaaggctgagaaagcatgccatgaaggtccaggcttggacaacaagcataccatgatgtgaattttagccccatcacctactaactgtgtgaccttgggcaagcttttgaactcaccagggcctcaatttcctaacctataaaatttttgtgatcattattataattacaactaagaataagtaccttatcgttttgctgcaatacacgcgtgataattgtcctaaagtgcttagcatggtgtctagaacgtattatgtacttaataattattgtctgaaaaaataaacacatgaagaaaataccttattgtcaaagaatataatactgtgccccaacttgtgaaagattaaacctcttgtgtctccaggatttctaatagcttatcccagaaaggcagtgcagaggacatgtgggctctcttcctactgcagactcgggctgttctgatggtggggtccaagggcagccttgcttctgccatttgctcagttgatcttgtgaacagctgcggttcttgctgtaactacttgctcgctctcagtgactctgtactgtaaatgtttcatgtgaaggagcactgctctaaaacaaagctggaagacagggaggcaattgccagagctgtcattgtgctgagtcagggaaggcttcagcaatcatccaaagagatgtggcatttacacctgcagctggatgggttatgaacccaaataggtccttaaaaaggaaggctcatctcctttccccccaacagccccccacccactcaatttttgcctactttaagggaaggtttttggtaactaatttttcatctgctcattagagcttaccaattacagcatgtgttacaaattataggttccaggactttgggtgaaatatgcttcgtaaataatggcatattttgctgtgagcagtccttgattttggactcttgcattacctttcatctcgcaaattttccgtataggaatacttggatgtacaaatttcaggcaagtatccgatgtatcttatagaatcagctacccgacaatattgtcaaaaagagaagcaacgctttcagatgatgtaagcatagaatcaagcaaggagttggttgaatccttcttgtgcttttcctttgagatcaccttatttcagaatcctaggaggattgaaacattcctactttgatattttcctctggagatcacttgttaaaagtcgtcaggagtgacatttactagtcttgtattttctctggtcttaacttgaaaagttctgctcatcaaaaatgagtatgttgagatgatattttctatagaaattttgtattttacccccttaaaatcctcacttttcacatgaaagtgtatgctcagataaaacaagactcatggagagcacatgggtgagatcatgctaggctctcattgctaggctgagatttgcatttttctgaaaatcagagtgctgaattttcttagctttgaagtagctaatgggacagtgtgtgtatatgtgtgtgtgcccacttgcatataattccgaatcacttgtttatgtgtagtatatgattctatgacaaagagctccctttaatgcaaatgtaaggcattcatgagcatctcatgtataagctcatattttgaactttgtttttcttttactcaaagaatttacaaaatcattttgtggtttgaaaagtaattcagatttcctataaaatgttatataaaattttaaatttagattttagctagcaagtattggcttaactgtagaaagaacttcattttctaggaccattcaatagtctagcttctgctttatgacaatctactcgtgttttttaaaggataataatattaaaacatttttataaatctcacaataatgctttatgtatattaactcatttggtccccacaataaccctgatggatgtcattattattatcctcgttttttttttttgagacagagtttcactcttcttgcctaagttggagtgcagtggcaccatctcggctcactgcaatctctgcctcctgggttcaagtgactctcctgcctcagcctcccgagtagctgggattacaggcgtgtgccaccacacctgtctaattttttgtatgtttagtagaaatggggtttcatcatgttatccaggctggtctcgaacccctgacctcaggtgatccactcgcctcagccttccaaagtgctgggattacaggcgtgagccactgcacccagcctattatcttcattttaaatatgaggaaactgagacacagagagagaatatacattaagatcagaaagctagaaagtctaggaactaagattcagaacaaaatcatctgattccactctctgtgctcttaaatacttcactagaataagtcttattttttataattgatacaactggtctaaatattaatgaagttttaagattcaatttacatatagcttctgtctctgtaagttaccagttattactacctaaaatacacttgtagtcaatagtaacattgaatattcctagattttattttataataccaaccagaataggaggcctcaaaacacctgtgatggaaaaaatgcagtgcctgagtgcatgcagctaagcctgatcactagaatacatttcatttatattttataagataccaaagacttcagaactacaaagagaactatagttgctgcaaccagaaacctattcacatatacgtacttttataaatcatgtgcatatgtgtgtgggtaccttcatgtgtgtgcatatataaatacatctaaaagctgagaaccaccttagtctggggcattaaaattttagtaaacttttttgatgtatatgttgaataagttgcaaagttgaagtctgttccctgcctccatgtggcttacgtacacttgctaatgagaaaggagcttattacaaatattcatagatgtgatatatatgtgtacatgtgtgtatatatatgtgtgtgtatatatacatatatatgtgtgtgtatatatacatatatatatctttctccccctacacacacatacacacacccctttattcgctctctttttttttttttttttttttttagttggagtctcactcttgttacccaggctagagtgcaatggtgcaatcttggctcactgcaacctctacctcccgggttcaagcgattcccctgcctcagcctcccaagtagctgggattactttctactatacaaattttactgtcatagacattggcttttgtacctccaaaatgtttgttattatccacggaaagggtacccacattttacttctatggataaattacacatatattgactgatagctactatttaatgaaactttttttgtgtttcagggtctcaactctatctttctatctatctacttatctacctacctatctatttttttctcaattaattccagaatgttaaatttcatgatggcaaaagtcattattaattttgttcactgacatactaagcacttaaaatgctgcctggcacatgtagagactcagaatatgctttcagaattgaatgaaaatatcttgacaaggtagcacagtttttgcttttgtttttgttttaatagagtcagggtattgctctgtcaccccacccaggctggagtgcagtggtatgatacagctgactgcagcctcgaactcctgggctcaagcaatcctcctgcctcggcctcctgagtagccagtaccacaggtgtgtgccaccacgcccagctaagtttttattttttgtattttttttgtttttttgagatagggtcttcctcagtcttcaggtacaatctcagctcactgcaacctcaacctcctgggctcaagtaatcctcctgcctcagcctcccaagtagctaggaccacagacacacaccaccacacccagctaatttttaaaaaattatttttagtagaaatgaggtctcactattttgcccaggctggtctcaaactcctgtgttcaagtggtcctcccgcctcagcctcccaaagtactaggattacaggtgtgagctaccacacccagcctaatattttattttttgtagacacagggtccccttatgttgcccaggctggtctcaaactcctgtgttcaagtggtcctcccgcctcagcctcccaaaaggttgggattacaggtgtgacccactgtgtcagcctctcattgttttccatctgacaggtgagaaactgaacctcagagagcatggattactgacccagtatcacagctagtgcagtgcagaagcaggagtggaacctccatttggctccactggccagactccctatctgtgactctgtctccaagaagctcttcgaggccagacagcagcatcttctggggtcttttaggtcacaagtatccctggtcttttcatgactacacatttctggctgactttagagctctagatgtttttctcctatgttgatctaccccgtaaggctccatgagaggcttggactattgtttcacagtaggcttcctaagacattttgcttagctccttgaaggcttccacctgctcttgagcttaggaggagaatatggcctagtcaaagagagaagagcataatagcagataggagtaagtgagcaggaaacacagagaaatggtgaagaggaggaaagaatggccaatagaagatggaaaggcagcagtcacggtcacaaaaaaagggtccagaaacaatacaggagatgcacaagagatttcattgcttttaagaagtgttatgctaaaatatcttcctctatagggaaaagacaatggcaaagaacttttaaaatttttatttggctacttctatttaagtattaagtatatcgcggtgtacaataaatgtttacttaacaaaatacataaaactctttcctgggctaaaccttgaaagacagtcatacatatttcataagttttttgttgtaaaatatttgatgatttcgcagttagggggtttcttagaaagtgctatacataatcagatataacctttccattttatatttccttgtgtaagcaccatgacttctagtaatcttgagtgtctccccttttcaattcacttaggaattttgcatttaaactattgcccttgtttagggagaacaaaacaacacatccaaaaaaatgaccaaatgtgtacaacctggtattacatttctgatttacataatttccacctcagaaaagttttcttaaatacaaaactcactcactttattttaatgcccgaaagaatagcccagataaatggactccaaatttgaggcctgagtaataatgcattttaggattagactagtcatccttgctattttcgtggtgttcatcacgtacagagtacaacaagatactctattatcccttcaggctgttggataaatacaaataagcacatacaaccaaaacaaatcattgtatctgtgaattgaaatgcatgtcataagaactttaatctggtgcaattgctcttatagccaagtaaatatagtcagcaaagcttaccttttatgttaagcattttacagattacatatgtaagataaatttaagatttgtgtttaaatgacttttaaaagtaaaaaaagcattgggaagacttcttactcagaggttgtggtcagtcattttcaaataatttttcattgccaacatctcatacataaacttatataagcttctacaacccctcccagagtcagccttctctcttctttcagtaacatcctgtgttgccatctgactgaactgcaccatttgtcaccagttccaacacatcttgtcaacataccttttctattggaagaaaaaaagaaaatgggcttgaataaaaacatgtaaataaatgatgagcactttgctcttttggttgaattaaacagtgttgaaaggtgttagctagagaagacttaatagaaagtataacattttaaataatgtttaaggggaaaaagaaaaagatattttaggtttcagaataaataaaagataaaaataaataataaaagattttaagtattagggatgacttgcaaaatctcagaggtaaaggtaagaaacactagacagaaaataattttatttgaatttaaaaaatgggagagaatccacagaccctttgagggaactggatcatctttgcagactccctgagatgtcgaaaaactgtgagtctgcttgctttctcaatggggatgctcatggtatggggcaatttctcagccctgatcatctgctgcctggaaatagactcagtgctgttggtaggggatggtgggagtgagaccggcctttaggactgcaggctgcatgggagtggggtgaggcctgtgattgctggctttcccccacttctctggtatcctgtatgactcaacagtggcagccataatccccctgggaatacaacttcattagactgggaaccacatccccatcccccacagcagccacagcaagccctgccaaaagagaggctgaactcagacacacctatccctgcctccacctggtggtctttctctatcagccctggtagctgaagacaaagttcataatctcttgggaggtctatggccctgtccactgcctaagaaaccttaatactcaaccagatgtccctagggcaagtttgcaacctgtctataggaccacagctgatgcactcttgaaaatgacacctcctggctggaggctaaaccaaaaccagtgcattaaacaaaaacacaaccaaggacctcacagagtccacttcactcccctgctacctccaccagagtaggtactagtatgcacagctgcaagacctgaagagggatcgcatcataggactctgcagatattccccagtacaagcccagagcccagtagctccactgggtggctagacccagaagagcaaaaacaatccctacaattcatctctcagaaagccccattcctaggagaagggggagaacaccacatcaagggggcacctcatgggacaaaagaatctgaacagcagttcttgaatcccagatcttccctctgacatagtctacctgaatgagatgggaccagaaaaacaattctggtagtatgacaaaataaggttatttaacaccccccaaaaatcataccagctcaccagcaatggatccaaaccaagatgaaatctgaattgccagaaaaaagaaaaattggaaggttggttattaagctcatcaaggaggcaccagaaaaaggtgaagtccaacttaaagaagttgaaaacgtgatacaggatatgaaaggaaaaatcttcagtgaaataaagagcataaataaaaaacaattgcaacttctggaaatcaaggacacacttagagaaatgcaaaatgcactggaaagtctcagccatagaatcaaacaggcagaagaaagaacttctgagctcgaagacaaggcatttgaattaactcagtccatcaaagacaaagagaaaagaattttaaaaaaatgaacaaaggctccaagaagtttgggactatgttaaatgtcccaacctaagaataactagtgttcccgaggaagaagagaaatctaaaagtttggaaagcatatttgagggaataattgaggaagatatccccggccttgctaaagatctagacattcaaatacaagaagctcaaagaacacctgggaaactcatcgcaaaaagatcattggcttggcacacagtcatcaggttatctaaagtcaagatgaaggaaagaatcttaagagctctgaggcaaaagcgtcaggtaacctatgaagaaatatctatcaggttaacagatttctaagcagaaaccctacaagttagaagagattggggtcctattcttagcctctttaaacaaaacaattattagccaagaattttgtattcagcaaaactaagcttcgtaaatgaaggaaagatacagtgtctaccaggcacacaaatgatgagagaattcaccattaccaagccagcactacaagaactgctgaaaggagctctaaatcctgaaaccaatactcaaaatacaccaaaatagaacctccttaaagcataaatctcacagtacctatataataataacacaatgaaaaaaaaaaacccaacttattcaggcaacaaatagcatgatgaatagagtagtatctcacatctcaatactaacattgaatgtaaatagcctaaatgcacctcttaaaagatacagaatggcagaatgaataagcattcaccaaccaagttttcttctgtttttcaggagactcatctaacacataaggactcacatcaacttaagataaaggggtaaaaaagatattttatgcaaatgggcatcaaaagcaggaatagctattcttatatcagaataaacaaaatttacagcaacagcagtttaaaaagacaaatatgttcattatataatgttaaagggattagtctggcaggaaaataccgcaattctaaatatataagcacctaacactggagcacccaaatttataaaataatcactactagacctaagaaatgagatagacagcaacacaatagtagtgggggacttcagtactcccctgacagcactaaactggtcatcaagacagaaagtcaacaaactctagcctgcaacaaatgaacttaacagatatttatagaacattctacccaacaactgcagagtatacattctactcatcagcacatggaacattgtccaagatagaccatatgataggccacaaaacaagtctgagcaaatttaagaacattgaaattacatcaagtactctctcagactacagtggaataaaattgcaaatcaactcctaaaggcatccccaaaccatacaaatacatgcaaattaaataacttgctcctgaatgatcattgagtcaacaaggaaatcaagatggaaattaaaaaattatttaaactgagtgataatagtgacacagcctatcaaaaccactgagatacagcaaaaaatggtgctaaggggaaagttcatagcattaaatgcttacatcaaaaagtctgaaagagcacaaatagacaatctaaggtcacacttcatggaactagagaaaaaagaacaaaccaaactgaaacccggcagaagaaaagaaataacgaggatcagagcagaactaaatgaaattgaaacaaacaaaaacaatacagaaaataaataaaaagctgtttctttgaaaatgtgaatgaaattgatataccattagtgagattaaccaagaaaagaagagagaacatccaaataatcgtaattagaaatgaaatgggagatactacagccaataccataaaaatacaaaagattattcaaggctactatgaacacctttacacacataaactagaaaacctaggggagatggataaattcctggaaatatacaaccctcctaggttaaaccaggaagatatagaacctctcaacagaccaataacaacctgcaagattgaaatggtaataaaaaaattgccaacaacaaaaaaagtccaggaccagatggattcacagctgaattctatcagacattcaaagaagaattggtaccaatcctactgaaaatcttccaaatgatagagaaagaaggaatactctctaaatcaatctacaaagccagtatcaccctaatgccaaagccagaggacataacaaaaaacgaaaactacagtcagtatccctgatgaacatagatgcaaaaatcctcaataaaatcctagtgaattgaatccaacagtatatcaaaaagataatccaccatgatcaagtaggtttcacactagggatgcagggatggtttaacataggcaagtcaataaatgtgatacaccacttaaacagaattacaaccagaaatcacatgattgtctcaatagacacagaaaaaccatttgacaaaatccaatctccctttgtgactaaaaacctcagcaaaatctgcatagaagggtcataccttaaggtaataaaaaccatctatggcaagcccacagccaactttatactgaagagggaaaagtggaaagcattcccactaagaactggaacaaggatgcccactttcaccacttctattcaacatcgtaccaggaatcttagccagagcaatcagacaagacaaagaaattaagagcatccaaaatggtaaagaagacatcaaattgttgctgtttgcagatgatatgatggtatacctagaaaccctaaagtttccaccaaaaagctcctagaactggtaaatgaattcagcaaagtttcaggatacaaaattaatgtaaaaaattagtagctctgctatacactaacagcaaccaagctgagaatcaaatcaagaactcaacccctttcacaatatcagcaaaaaaataaaatacataggaatatacctaaacaaggatgtgaaagacctctacaaggaaaactacaaaacactgctgaaagaaatcatagacaacacaaacaaatggaaacacatcccatgctcatggatgggtgaattaatattgtgaaaatgaccatactgccaaaagcaatctacatattcaatgcaattcccttcaaaataccatcatcactcttcacataactagacaaaacaatcctaaaattcatatggaacaaaaaaagagcctgcatagacaaagcaagactaagccaaagaacaaatctgaaggcatcacattatctaacatgaaactatattataaggcaatagtcaccaaaacagcatggtactggtataaaaataggtgcatagaccaatggaacagaatagagaacccagaaataaacccaaatacttacagcccactgatattcaccaaagcaaacaaaaacaaagtggggaaaggacaccctattcaacaaatggtgctgagatcattggcaagccacatgtagaggaatgaaactggatcttcatctcttatcctatgcaaaaatcaactcaagatggatcatatacttaaatctaagatgtgaaaccataaagattttagaagataacatcagaaaaacccttctagacattgacttaggcaaagacttaaatgaccaagaacccaaaagtaaatgcaacaaaaacaaagagaaatagatgggaactaatgaaactaaaaagtttctgcacagcaaaaaaaataatcagcagagttaacagacaatccacagagtaggagaaaatcttcacaatctatacatctgacaaaggactaatatccagaatctacaaagaattgaagcaaattagcaagataaagacaaacaatctcatcaaaaagtgggctaaagacatgaatagacaattctcaaaagaagacatacaaatggccaacaagcatatggaaaaatgctcaacatcactaattatcagggaaatacaaatcaaaaccactatgtgataccaccttacttcctcaagaatgaccataataaaaagaaaaaaaaaaaccaacaaaaaatagttgttggcgtggatgcaatgaaaagggaacacttttacactgttggtgggaatggactagtacaaccattatggaaactaaaagtagatctaccatttgatccagcaatcccactactaggtatctacccagaggaagtcattatacaaaaaagatacttgcacatatacctgtatagcagcacaattcactgttgcaaaaatatggaaccagcccaaatgcccatcaatcaaccagtggataaagaagatatgacaaaaatatttatatgtacacacacgccatggaatactacttagccataaaagcaacaaaataatgacatttgtagcaacctggatggaattggagattattattctaattgaagtaactcaggaatggaaaaccaaacgttgtatgttctcactcatatgtgggagctaagctatgaagatccaaaggcataagaatgatacattggacttcggggacttgcagggaaagtttggggactggcgaaggataagagaatattcactgggtacagtgtacactgctctggtgatggctgcaccaaaatttcagaaatcactactaaaaaacttactcatgtaaccaatcaccccctgttccccaaaaacctattgaaataaataaataaataaataaataaattgaatgaatgaaccaaaggtattgcacgaggaagcaacataaataaacttagtgagtgaaacagtgaagaaaggggcaatgtgatggtggtgataggtatacaggttaccttgttcacccttttaatactgtggataaacagaatcaagtaatttgttcagctaactagattccatgaaaatatgtagccatttttctggctaaatgtaagaagagggaatgaacaattgggttagaaccttcataaaaagacatccacagggaagctacaaagatttcttatggtccccaacaacaagttcgcatactgtgcctaccttgtttttctcacagtttgatttcaatcctctcacattttgtgaggtggctgtttataccaatctgtggcctaagatattcttatgactattacttgtttatcaaaatggtacacattcttcagttgcagctccacaggctttctggaactactgtaattaacattgatttctttatctctttccttatttgtcatgtatgattagcactacatagaatgacatttactttttctcctttttcttttatatgtgctaattctgtctctttagcctagtcagaagctctgagttcgcagaataaccatgaacacagaattaaaggtctagatagatcttgtctaaccctttcattttcaaagaaggaaagtttgtaaaatggaaactacagtgatattgagtgtatactatgtgtcagacagctttaacatttttgtatgaatcactcgtgttgtcatctcaaaggtcatatggaatacatactattattgtcatcattttacaaatgaaaagaacgatatgcagagaagtggcttgctgagggcacacagctagtaagagacagtgctgggattcaactctagaccttctggctctagctcttaactttccaagttagtgctgcaggtagaacaaaaactctgtctcataacttctttctccatttcagggctcttgcttgttctaactaatttgtaccaccataattcttatactagagcataataaaacaaaagagatgcaagtgtttattaacttcagccttgtatttcacagatcctaaacatgtaaacatacacctgatacactctcatcctttccgaagagagcaagtaataatgttatactgagtgattaatgaactgatgtaaggactcagtaatccgcatgcaattagtggatcaacaaagcaatttacgcagtaggtatgtattttgaatagtattctttctgtagggaaccagctgtatgtagtgtttaattgaatgcttttgcatcacagagtgatttggagtcaaatcatcaaccgcatttcccaatgtgtcaagtagacagttaacttatcaaaacttccgtagtactcagttctcttccaatgtgctccttatcttgaattcttttgaaatagtgtgccttataattttccaggaatgatttacatgtattcctgttcagagacagagggatggattacataacattccctgaggccctttttgccttcgagtaaatgctctttatcattctaagcttcttactctgagtaatatttgaacatgaccctgtggattccccataacaatttctgatactgtttccctagttgatatgtttggatattttccatactatgcaggctgaattctctttttaacttagtatgttctttttcactctgatgctttgacttttgccatcatagttttctttattttcagagtttatcgactgtcactaggctttcttctgagtcctttcgccaagtcatccatactttgctcttctaatcttctgttataacaggcttcctgttacttatatttttgctgttatactctgaatttgttccagattttctggtagagatttccctacaccaaaaacagtattccaggtgcagccacttgagaattgagtagagataaatatgtgcgcccctttttactgtgatgtcttgccatctgcagttcggagcctgtaaaagttagatttgggattgaaaataagacttccactaggactgccatttgcagcacaaactcacctggatggtaactgctgtctagccgcagctccctttcgacaggtccttctcagaagacttcttttccaggcttttttcttcctgtgcatatctgtgttttcattcattttcccctggtgaataagctggccctttcccaacctgactctcatcttgttatttgatcccaagatctgtaactcctctcagaccatctgcattatttctctgtccttgctgatgttttgcaacattctccagctgactatcatctgcagatttcattagcacaccatttactatgttctgaagatcattaataaagatgaataaacagaagagaagaccttctgcagacatctgtggaatttctctgggctgcccccacaactcgatcgccattgttttattttacctttttggttttttgcctagtgtttcattcacttccctccataagcaccctgttgtcatatctgagtaactgcactcataatgtgtgattttcttgcacagctttataattgcctaaacaattcatcatttgtctgacagcatttttcctttattaaatcccagttttattgacagttttcattatcttctagattgcagaagctatatgtaacaatgtgtgtgcccattctgatttctcctcaatttattactgttttaaaacctgtactatagatgataggaagagagtacgatgagaagagatagactcagaatctctatggctcttcttggaaaaacaccataatgtgtatggaagatcatgcatggggattttcctgcaaggcgctaacagtgaactttctatccaaaaagatagaaagaagttgtctctggttttgaacaatgaagatttatatctaacttatattgaaaaatcaaaggattagattttttaaactgaataagaaccatagctgtacttagagaatatctgtgatgcacttggcactgtgataagatgtgatgtatatcactctttatgattacaccaaccctgaatggcacttattttcaggtgtgacactagcctatggcggctgtcatgaggattagaaaatggtgtcccctccaggaggatactgcctgtgcctgagaatagagcacaggctgcatctaaggacccactgaccttctaggccagatatctttgtgtgtggcagagcctgcctaaatgtacatggaagccacgatttctttgtcatttaaatgaagaggataagatacctataaaagatagatttgagattgatactaatgtggttcctccatgccatattgtttctctgcacatagaacaaatatggatctaactcatacttctgtgattgcctactaaattcaaacagtactttgtgtttttacttagaaaagaatggatatggccgggcgcggtggctcacgcctgtaatcccagccctttgggaggccgaggcgggtggatcatgaggtcaggagatcgagaccatcctggctaacaaggtgaaaccccgtctctactaaaaatacaaaaaattagccgggcgcggtggcgggcgcctgtagtcccagctactcgggaggctgaggcaggagaatggcgtgaacccgggaagcggagcttgcagtgagctgagattgcgccactgcagtccgcagtccggcctgggcgacagagtgagactccgtctcaaaaaaaaaaaaaaaaaaaaaaaaaagaatggatataatttaatatgtaaccttctcttccaatctttagctatgctgttgattttcttcccagtcttcagctatgttgtttttgttattgtcattattattattattatttattactgaatctagaaagaatcatggagaagaagcagtattactctgggccaggtattctttgtaatatctttaaaatacatttgaactctgttcacatatccctttgtttgcctattagatccggtcaacattatgcaaacacacaccttcatgatattgaatattgatcaatttagtcacatgccatgcaaacgtagaaataccacttaatggctgggcatggtggctcatgcctgtaatcccagcattttaggaggccaaggcaggtggatcgtctgagctcaagagttcaagaccacccagggcaacatggtgaaaccccgtctctagtaaaaatacaaaaaaattaactgggtgtggtggtgcattcctgtagtcccagctacttgggatgctgaggcaggagaatcacttgagcccaagaggcaaagttgcagtgagccaagatcatgccactgcgctccagcttgggctacagagtgagactccatctcaaaaaaaaaaaaaaaaaaaaaaaaaaaactactacttatcaaggaatgttttgaatgctttaattctttgacttaaattactatatatatttataaaggtgtagaagatttaacaactggaatgtgtgtgtgcgcatgcacatatacacacatatgcacatatgtatatatgtgtatgtataacatatatatctataaataaaagttatttaccaaagcatcatatattttcattttcttttctttccttttgttagcattttcatttttcttgagtactgtttttattgaaatgcaccttgcactttagctatagagcttttccttgttgaacaatgtagttttcttgctcaacaactctgacatccaggtaaatggaaggaaaatggataggggagttgtgtgttcataatgccactttgccaccctgaaatctatgcagataatctacttggaaggctttgagccccagtggaatacagaaccatgtaagtatcctgcattgatttacagcacctgctacagctgcttggatcttggcaggcattttctctcctgccaaatgctgttgaaattgctgggctggtttagatggaggttatatttactggacatgtttataatcttcagagtgatctaagccatagagagctaatttcccaaagatcaatgactaagggaggatttcagaggttatcctctttatccgatttcctgtgtcctaatgagatggctgaaacctgtttggaatctttctgattaggaactcttgtgagagtcaataaagaatatgacattcataaatctaaataagaggcgacttggcagcctgtaggtgattcatgccacgagaagcctttcccctgcccccaacaggatgtgccatgggtggccaacctgagacaaggtcagacttgaaccaagagtcttgagaggacttggcctctcctggttaattcagaggactcttctggctattagaatgcgctgtgtatattttttacctgtcttgatttaattcaattcaattgccattcaattcaaacgaaatgtatttgttaaatgattattatgttttccaattaagaaggatgacacaaaaaaactatattggtatatggtaaggatcattatatagatctaaaaaagttttatcaaagatgatgataatcataatagctaatgtattttgagtagttactgtgtcaggcagtgtgctaagcacttcacacatgttatttaatcctaacaaattcatgaattaggtcttattatacctattttgcagatgaagaaactgtgacttagatgcattaattaactttccatgttaacaaaatccttcccaaatcccatattcccctctcgctgtcttttgccccctctcagctaatcttctaggaaaaacttgtctgcctttatcatctctacttctttacctcccatttgtttctcaacccattcagttaggcttctgccactgccatcaaaatgaaaattaaacagggtcatcaattcctccacatgtccaatacagtatttttgtttcactggattgctcaccaccttttcccacaattaaccacttccttctggaaacagtatcttctcttggtttcttgtaccacatattcctgtgtttcctctggaatcatgagctgcttatctccatttgatagcacctcttcctctgcctaatttctcattactggagcattttagtttcggttctgggtcatcttctcttgcccctggattctgccctgtgtaggggattttaaacattgttggtaccacgtacattattggcagtctcatgaagcctatagactcgaagtgcataaaataccctggatatctctcagtatcccaaacgtagttcttacaaatgggaactcttgttttccatctgcaaatttgtttttcctccagtcttgtccatcatcaatccagttgctcaagaaaactagaagtcatctatgattcctcatttatcctaaaacacaaagcttataccatccattagcatgtcttggctattttatcttcccaccgttccagattttcccactttttccttctatccactgccaccctgctgtcaccccttaggtggtgcttaatacatgtttagtgtatgaagaaaggtttggaatggggaaaataaagagacacactgaatcactaggggacatgtaatactctaggcaagacccaagatagaacagggacagtctgaactgaagacaagaaggatgaatttaaaagataagtgtgtccagtggaaaatacagacaaagaattaagagttacaaatgcctgttagtgtaatcgggttgtttgaagctatcttttaaaaatttccatttctttttaagtagccttttacctcatgttctgtgaagtcttttggagacagtaaatcatattgtttgggaaatttaagggtggagatgggaataaaactgaaaagaggaatctttcctagattaagttgacaaagaaacagctttcttcagccatttctctccagacactagtcaaacaaacaggtgagcaccagatagtttgagcagcagctggaacagttcaataagagtctccctctagcctctccttacttctgaataagccaagttaagctacagtcaactagtcggcttctctaatattctgtattgttctgaggtttaaggctttgtttttttcttggctgtctaggctctctgattaactgagattaatctctatcatcctgtgtaagctaaaccctaaattacataatatgttttctatctgtatgccatatgccttccatgtcagggatgactccagagacaacaaaagcaagctgtgtttttactgattttgcaaacttgcattcatcagccttgggcattttggcctccccagtgtcagtatggtgttttaatagctgagaaaaacaacagaaatataaagagaggacactgtgaaaatcactttccaaactgacttgtattgaaactgcctcacatctaagtaatggaaaataacagtgattaggataatgcggtgcattacattcggtgacagttaatcctcttattaacttcatggtcatatttcgctcatttgttaggttggaaggactgtgtgagaatattgtagttcctgtttttctgttcattgggaaagttgggaaaatagttctaaaaataaaagagttccaggttgaaaagcctttgaggttgactgttctctctggagatgcatgtttaccttgtgccctttatccatgctttgagtttgggtacccactctttgaggcctcattctcttccctttagaggattttctttccacctgagcaatcaccagtgagggaaaagtcagtggggtggttcagctgcatgatatgttgcattgacaaatggaggcagagccctgctccagccccgtgagttggaacaacctacaaagcatttctggcagtgagccaaagaggtgatccctcctctagggaaaaaaaaagtcaatggctgagattgcagttctccatccccttgctgggctgattcatacagcagcattgacactgaggtctcagaagaactgttctcttcccagtccatctaaaaatatctaaattcagatttataatgtcaggagctgataaatttgctgaggaaatgcaagcagtgtcactgccatgctaggaaatctattctgatgaattgatgagggaaagaaattccaaacatagcagagtctcagagtgccacttcccctgggatggtgagcaaaatgagcatgttttccttgccatcgaagttcccttcttcaaacatagtagaaagtagaatatactagattgaaaaggaatatggaaaatacctttttgatcaaaagcatgacatgacataaaactaaatcttatggcctgtaaaatattcttggtttacgtcaagcaaggggttcccttttaaaatgctctttcactaagacaaaaattccactcacatagccctggtgacttttgattgaatcaggatcttttaaatttggaactcagcaagaaaccgactgtcttactttcctacagcttttgtttgaactttcagaatctaagttgatattgcggtctgctgctaaccagctctttcctctctttagttggtcagtggattctcaggagtattataggatgtttcctccataccacctggcttgaaatgatttggcataggcttcaactctaatttattcagcatccctttagcgcctactagaaaccaagtatcatgactggaacttttctgaaatgatgaaggtgccatggggacagatgggcgtgtaaagaacttattacaaatcaaatcataacataataattgatactgaacaattgctatgagaattgaacagaggaaatgcttctgctgggaaaagaccaagaaggcttcagagaagaagcaaaatttgtggttggggtgatacaatgaatgagtactagcaatttctcaggggagcagagtatgtctaacaggcagaacagcatggcactaagttaggaaaagtaccacctgccttagggacttcaacaagatatttgaagtgtttaaataatttttttttctcacttggattttggcttttgccaaacaactaacaaacaactgttacatttgatctaattattttagatcattaactttgaaaattgctgtttgtgtgatttcctacattggccttgggcctattatgagctgacatctaatgaacaggtggctggtacattcctggagttttgcccttgtcaaacacttgacccagaccgcaaaatgtcatggtagctttccctgctgaaaccttgtggacttacagctcagtaacgatgttctaatgatctaacatgctatgccatcatttgttgattcataaagtcatgagataaacactaacattattatcactgtctctttgaatgaaaattaaaggctagacttttaattttatgcagtattttcctgactcaattatttgcattaaaaaatgtttaggcatttcattctcatggacctacctcttaatatgctttcttcttaatcaggcaataatttgtaggtttgggcctcaatttcaatagcaagtgagccccaaactcagtaaaaagcaaaaagggttttttttttctgagattcaataggaaacacagcatacaaatatttcatgtaattttaaaaggtaatttagcatagatatgcatactgaagtatttaggggaagtagaaagatgtctgcaatttattttgaaatgcgtcaacaaatatgacggatggatagagggatagataaatgggtggatatgtttgaaagcaaatataataaaaatgttaccatctgagtataaaatacagctattgattataaaattattttaactttgtggaatgtttgaaatttttacaatatgtttggggagaatgataaggtagcaaagaattaaactggtagaggtgcttggataagaatgataagatacttaaagtgaagagaaatttctctgacttatcaaaatgtagacacgaatgtagttgtgtctgtgagtcaaagtacacaatctctcttctccattagcttatgaatctgtcagatgagaaaaaagatcatcctaggagaaagagtagttcactgtaaaggccagaactttagtctacttggcaatatataaatagacttttggggtttatttttaatataaaacactgatatttttcgcaaataaggccatttctgccttctcagtcatttcaacatatattgagcacttcctatattcctggcatggtgctaagcacgggggctttaacttcaaaaagttgaacatcaagaatggagaaagagaacaagaaggtgatgtcgcacacggaaagaaggacttaaaatgtgctgtgagagctctgaagagggagaagtccctggcttgttagctctgatttggggcaggctactaaacctttttgtgccttagtattttcctctataaaatctggccaataataaatgttaaactactgtctgttaaatagctggaccttcataaatggtcactaatatctttaacccagagaggaagatcaaattaggaaaaaaaaataacacagccataaaatttgtttgacagacatccttctttttcccatccctcctctataccccatcttttgttgccctagtagaatgataaaatcacagccctggagctggaacagacctagccctagattttggacagatattccattccaacccccatttagaggtgaagacactgaaataacttgagaaaagtgacttgtctcaggtcccatagctagtcaatggcaaagtgggtgaacatgtaggataataaagcttttactggagagagaggttgaagaaaagttctttggaaatatagtttatgatttcttaggatgtaagagagaaaatgctcagaaactttttttattgttagaagagaatgtgttttagtgtacctaaacacattgcattagtaggttctcaagaggcatttgttgacttgtattgcattaaacctctcctgctaattgtctgtatagcatggttaacccttgttatgtgggtaactgttcctttaattaaattagtttttaagtcttttaattatattttggtgcctgtaattgacagaatctatatctcttaaccccacatagatttatgcagttaggggtagtgaagattgcttctctctttgtgaaaatggaatgagtactcttgtaacatctctatatttgtatcttatttgatctgtgggacatagaacattttcttgacaagatagcgatttcccctagagatctgtcaattcacaactttgaattaaggtctctaggcgttctaattatcagagccaatgacccccgctggctttgacctccaatactttagctggacagttcactcagagcaaagatagaggttctttatactaaaggagaatatttcttatcacagaggagggaaagaaggagaataagagaaatagagggagtggaggggatgagagaagggaaagagaaagagagtaagtgagatgtcactgcaaaatgtttttaaattatttagttgatactattaggttggtgtaaaaatagttgtgcttttttccattaaatagtaatggcattattaaaattggcattattaaaagtaatggcaaaacggcaattacttttgcaccaacctaatattaaatttttaaaaaataaaagtcatataagagactaagcaaatccacaataaaataaataagttgaaaattagtgaatgaaataggatctccacaaacaatgctgcagaatagtttagaaacactgaaagatatttctaacatgcaatacagatcctttcatgcttcatttgagaagctggtataaatagaaaagtgaatgtacagtttcagaatctcagaccagaaaacattctagagcacaagttctaagacaaaagaaagagaggactcacactctacttgggaatgggctgatttttgctccattgagcagattgcactgttgatcaacaaggtagatctggtaagaagttgagacagagacaccacatgctgaagaatctaggctgtcggtgctttttggaatctcagaaagaggtcagggagcccttgtgactccaggaggtaaatgactttcccattgtttgctgttccttcccagcctcaaaaagtagggatgcagacagctgcttctgagggtgattttttttaaatttaaaagttccacctgggcatgatgcagttgctcatggctgtaatcccagcactttgggaggctgaagcacatggatccttgagcccaggagttcgagaccatcctgggcaacatagtgagaccctgtccctacttcaaaaaaaagaaaaaatcagcctggcatggtagtgtctgcctgtagtcccagctaccagggaggctgaggtgtaaggaccactttaatctgggagatcaaggctgcagtgagccatgatcatagcactccactccatcccaggttacagagtgagaacctgtctcaaaaaaaaaaaaacaaaaaaacaaaaaaacaaaaaacaaaccttggaaaagtctatagcttcatcttatgcattattcccccatatactgataaaattcaagtcccttcatagaacccaaacagctgataatgtggcccataattgtgaattccccaagcccagcatttgaaaagacaatttaaaaaatgagagagaaagagagtcagtgctgataagtatgaggtaatgtgaatgtgtaggcacagggtgactttgtaagtgggaagaaaaggagggagaagctaactttcattaagagtcttctaggttgggtgcggtaaatcacagcactttgggaggctgaggtgggcagatcacaaggtcaggagatcgagaccatcccggctaacatggtgaaaccccatctctactaaaaaaatacaaaaaaattagccaggcattgtggcgggtgcccccctgtagtcccagctactcgagaagctgaggcacgggaatggtgtgaacccaggaggcggagcttgcagtgagccgagatcgtgccactgcactccagtctgggcgataaagcgagactccgtctcaaaaaaaaaaagtattctgtgagccaagcgctctacttgattacttgatttaatcctcgcaaatatttttcatataacatgatgagaagatgggggttcttgtaagcagcagaactgggatttgaacccaaatctctatgacataggtccccatacattttctatgacattggttgtgtgccatctggctcatgactttccagcaatttcatggataaaagatgtataataatctgacattcaaaacccatatacttttgcctgtgttagctgctctgggtaaaactattggataaatgaggtttggagaatagatgtgaattttcattattcattcccttctgagaattgtccaaataatattatttctaccagggtgaaatagagggggaaaaaaaacccctaggtttctggaaatattgactatgggatataaggcaaatttagatgttaaaagtgatagttgccaaatttgtcaaatgccgtaatgttctcatgtacaaaaaaagttggggaatttttgtcagaaaattatgagttttgcactggccaattcaaatcaaagagtttttttttttttcttgtctttggcaggttttacaagggggtgtccctgaggggaggtgaaatgagacctagaagcaatttttactgtaacacacacatacccatgcactaacttgctttcatatagttacctgtacatgccacatttcatgattaaaatgcagtccagaaaaatatggtgcactgggctatgtatgagtcccattctctttctttctatttttaagtggattttatgttgcctatttagtctgtaatgaccataagccactccagccaacttgttttaaagctcagagagaagtaggtcactaaacaatagaataataatgtggccacatatttaactttctagtacccacatttccaaaaagtaatttcatccaaaactatcatttcaacatgtcattaatgtaaaacactgttaatgagatattttgaattttttagtggtaggtcttcaaaatctggtgtaaatttgcactgacagcccatcacaattcagtcaagcccacatttcaagtgctcagtaaacacatttgtctagtggctcctgtattggatgacacaggtgtagactaggaaagcattcactcatggtgtttattcaatattttctctatcttctatcatttcttatattaagttgtagagagagagcgcactatttctaccccatcagagaacatgaagggatgcagagaagaatatgttgagttgactacctacctcacagaggacctctgcatgacatttagttgaagggaactgccttctctttttccaggaagattaaatctgtatcctctctgccattcagtttaatacctatgtgcaaggcatcagtagagaccagatagatagatagatagatagatagatagatagatagacagacagatagataggcagagatgtttgtgtgtgtgtttgtgtgtgtgttgtgtgtttgtatctctaagtacatgaagaattggcatacatcccagaacacaacagactgaaactcctgattaaagataacaggtaaatggaatgaacatccaataaaaacctgtttgtgtttttaaacaaaattaaaagactaaaataagaatagaatataggaataggaagaaagccttacatgacaataatcaatttgggtaccattttgttacctcctggccttctgcaacttaaagggaaaaaaaaattaccaccatcaggcaaatgccttatcatgataggacaaaattcttcccattgtgtggctctgttggcatttttaaatgtgtcatatgtggctgggttgtggggtacaagatgtagacttgcttaggagacaaagaccagcataaacttttgaggatccatcctacatggagaatgtagtgaatatgctattgctctaagtggagacagagtcttgcatggcaggaagcttcctaaggtgaccacttgagtcatgaggcttagaagtctttgcagaagagggaaatgagccttcacattaggaaaatatgctttactattacataagttctgggatcaactgatacaaaagttgggagaaatcaaaattttaagtttttcctatgtgtgtacctatgatacaatcaagtttttattcaatttataactcctgaattcattcatcaggagtcctttaggaagctaaacagaactggcaggtctgtcatttggatttgtcatgattgtgagtatttcgttccctgcaattaaaaacgtctgtgggacaacaggatttcaagtcaggagattgttgggtccttgcttctgctacttagctaatctgtgactttggaaatcactctctgaatgtcattttgtttacatctattaaatgtaagctctctctgatagcattatgatgaggaaaaaatgaaagcatgtgtctgaagtatctggtacagaggccagcacatactggttgctcaataaataccagtttctttcccttttactactctaacaatttctcgtttgtattttctgctcctgagctctgtgtcttgaaaagttctgttggcatacacattggacttgattgcttacattaaaattatctattcttgtctctattttgtattaatgaatacaattaatctgattacaagtataaaactatcagtcaggtttctaaaaagttattaaaacatatatgtattacctgcttcccacattccagtgccaggctctgtagaaacaataatgaataatacagctattgccctaaagaggcttcaccaatcctgtctgtggttcagcatcaccaggcaataccaatttgtcatcatcatgctgaatggggagaggtttagaataatcacaggagaacgtaagaccagctcctggccccgtcttgatgggtcatgaaagaacaccgggtactatcctgagttgaaataattctagctcatagttaatctataaagccttatccagagaaattggagattatctttaagcattttgaaatattaagcatagcctgctggccccaaatgacattttttttaatatttacaaattattaataaaactaaaaatttccatcccttccctggaaccccaagcaaccaccgattatttatttatttattatttatttatttatttatttatttatttatttatttatttattatagagatggagtctcactatgctgcccaggccggtcttgaagtcctggccccaagtgatccctccgcctcagcctcccaaaatgctgaggccacaggcacggatgcagagtttgcagatgggcagctaccattttcgagtatgcagtaactgagttttgtgagaagagcaaagtggaaagggagaatgacttaattaggtctgtcctttagaaacaggtctgcaaaggcagtgttgcaaactaatccaagtgaaaaatcatgggagacttaaatgaaagcattcctgggaatgaagaaggcagatttagtaggattactaatgacaggttggatggaagatacaaaagagaagaaatctatattgctgtgatccattaagtctcattgtctacttttaacacttaatggggtggcagtgttgttattctaggctatcctttatgaggttggggttcttccctgacagttgctgaggctgtgggaacaaacgagttcatatagggagtgagtgaggagggagacttcagacgctcagggattctacaccatggaggaggctatgaaggagatccattttcttctaaatcattctgataggcttctggatggctttcggtctctggccaggtgctgatggaaagctctcctctctgatgaagattaatcatcaaacccaggagataattttattctgctcttctgagtcatgttagattccagaacaattaactttattttccccaaatcttgtatctcttgggaatcttccagtaactttggtttccagtctacggagctacttttggcagcttgttgtcaaagaagtgataattcttaaagcttagagtgctaaactgcaactcagttgagaattgaaacctttccagtaaggggctcagccccagacacctgggactcctctttctcctttcaccctcaggtacaggagtgttacataaaatggcactaatccacttttacagtttttgtgttattaagcaatacattaagatttaataaccataacaaaagggttgttttctcaccaagcagttattatttgttgtacttctatttctactcatttaccttaggtttgctttagcgatttcaatttagtaggtgtctaatgatatgcctgtcaatgaaactttagagatgactttcagtccttggaatttttttttcatagtttcaagaagcaagacttgcgaagatgatttgcgttaagaggtttgtgtgagttgagtgtggacttaaattaaaagtaacttaatttactcagagtagtagaatctagtgcatttaaattggttgagaggtgcagacttcgctttggaagtcactgtaaatcgatgccgatagagtaaaaagcattctctgttctcttgctgttcctttttgaagggttcagaaggttggaagagcatccaaatcagtataatcagacctattagatcctagcaaagaattttaaatacatacatctttttgcatattgattctggcaatttaaccctcagcttaaaagcagaaagttggttcaagtgaatacaacatctcactctgcacaatattaagaaatagatctactgaaactaataaaagaattccattgttgtctcctccatttaaaaaaattctacctgaaatacttgttagaatttttataaaagtagtatctcatttatgtacaaaatagtttgtgtaaactataagtagacaaagatgtagggttgtatcacttctttgataagatactgatcttgtatttttaaccaatgctaggcttaataaaagggtcctgtaaaatttactatgaaatctgtatgcctccctccaacttcttttccaactgagattggagtatggcaaaggaaatgaagcatgaagggaaaactaggagctatgataatctaagattcataaacaattataacattatttgctcacttttgattgtgcaaatgactaaatcttttaatgaagcataatgacccatctgacacatatataacaacacataataaaagataaaattaaatttgtcaaagcaatatagaccacccactactagtagattatgtttgggtttggattttcatatattttatccatatctgtttccttctattgggactttatggaggcattactcatgaactttggcagatcttttttggtgtgtctgaaagaaaatcccaaagctggttactaagatgtttgaaagtcatattcttcttcaaaccgtgtagaaataactatcaggaaataagtggttataattttaaaatggcatgtttagggaagagaatatataagtttgaaaaaccgcagtctcctccaatacatttctacctattactaacagggtcaaaattgtctacagaaaacaacctgatctcaatttcctcagacaattcagctagtaaaatggtgtgactgacctagagttacggagataactcctactgctgagctctctcaacaagtgacaccctggttgacaaacaatcacacattatttattaaacttctatttaataacaggagttatggagttagcaatgttaagtgaagagtccttgttttcaaactttgcaaattacagttagtaactaataaactaattaatgtcctttatgaagagatgctcagtgatggcctgaaaaatccctaaaggagatagggagagaattgaagtatggaataaaatgacctatatgggaccttcaaacttggagttttctatattttcaaaaattacttttgctgtcatttaatgtccaaatccaatcccttgtctagggaaccagttcggattaaacaaaatttcaaaaatacacaagcaatcaatatctaattcatttaagtcctgtttcttcccaggactgctgggtataagcctagagttgcctgccatttctcttatattcaaacactttgggaaaggagccatttttttagatctattttctccctgaagcttgggagctatatctatataaaatgagatgacatactagggctagcgtactaaaaccttttctaagagaatcaatatagctttgagaagcctcatttatatttaaaggagaaaagagacataagtagaagtggacataacgtatcatgtagacattgaaaaataccagaaatgatttaaaagtgactgcgtgttctcatattcccagtgccttgtaatttgacttggagggatgttctagatctccattgaatgtgctcactgagatttgtctttgtcgtattgattacaatcatctgtcaatgccctcaatattttctgtactgaccaacagcgacacagatcataggctgtaactagtacaggctgtgccaatgaaacaatagggctaattagcagacatgaaaatgaatcactgatttaattttcctcctggtctaatcaacacaatgtgtcagctaaatattttgatccattatttcaagtgaatagaatgtgcttttatattatcatttcaatttcattaccttgaatattggaatttttgatttttggatacatcagtgtccagtcagtatccagtgatttttagatacattttggatacatcagccttagcatacatcagtgcctacgggtataaggcactgatatgttaataaacatattaacagtttgtaagccaatgaaacctataattattgcataatttaaattaacttgtgtacaaaatgccataatatttccacatacgtggtggctttcaaaatcaaaataaggtgagcctatttcaatttatgacagacaattgtatatctcctctcttttctttgccaaagaagccctttatttcatcctcacaggtgttatacttgtctcctttctgcttggtgaaacaatcacggtttgtaatttcactttctgaccatcaaatacgataaaatgaaacagtttgtgcttttcttgtactttccgctctcaggggttactggttgagagagctcagcagtaggagttatctccgtaactctaggtcagtcatgccattttaataggtgaattgtctgaggaaattgagatcaggctgttttctgtaggcaagtttgatcctgttggtaacaggtagaaaatgtattggaggagactgaggtttttcaaacctacatattctcttccctaaacatgccactggctggctgggatgctaccttataaatgtgaggtagatgacaccagtctgtaactctagacttctgtcatggatagcaggataacttagactgagagctgtctgtcttcccagcccacatggccacaggatcagagcaggtcatggtgaagcagaggagaaacagctgcaaagcagagaagaaagtccaatagggtaggatgtgatgaataatgttgtgaaacagacagctagtgccagtaaggctcctatatcatagaagtctaggaagatacaagcaagtgctgtcatagacagataaatgaagtggacattgttttgagacaaaagcaagctggcaatatcagagaagcttactataaagagcaaaatgctgggtgcactggctcatgcctgtaattccagcagtttgggaggccaaggcaggaagattacttgagctcaggagttctagaccagcctggtgagacctttatctctacaaaaataaaattaaaaactacctgggcatgatggtgcaggcctgtagtcccagctacttgggaggctgaggcaggaggatcgattgagcctgggaggtctaggctgcagtgagccatgacagcaccactgagccttggtgacagagcaagaccctgtatcaaaaacaataacaaaacacagcaaggaccctattactctcaatgggaaaaatcgcagttgcttttgggccagcctaataataacttgacagagagaattttattccctgcaagctacgagttcgttttctttaacagatgaggtaactgagccacataaaaattaagttacttgtctagagacacccagctgataagtaagagagcagacatttctactcaagcaatctgactccaaagctcatggtgatgaagcaggtcatgaaagctctctttatgacacatttgaataaagcagcatgacagtgggacaaaaagtacacaagacaaaagctccatcgttagggccaaagcataggaacaaactcaggccagtgatggagcaacttcagctgagattttagccaagagcttgttaacatctttccagttcccagatagaattagtcctaaggaattacgaacattgtattccatggcatatatatatatactacattttctttatcctctaatcaactggtgatggacactgaggttggtttcatatacaagagcagatgtcttttatttttttttttttgagacagagtctcactctgtcacccaggctgaagtgcagtggtgtgatctcagctcacggcaatgtctgcctcctaggttcaagcgattctcctgcctcagcttcctgaatagctgggattacaggtgcacaccaccatacccaggtaatttttgtattttcagtagagatggagtttcaccatgttggccaggctggtcttgaattcccaacctcatgtgatccacccgccttggcctctcaaagtgctgggattacaggtgtgagccactgcacccagccagatgtcttttttaatatgatgatttattttcttttggataaatacccagtagtggtattgctaggtcaatggtagctctatttttagttccttgagatatcttcatactgttttctatacgggttgaaccaatccatattcccaacagtgtataaatgttctcttttctccacatcaacatctgttgttttttgactttttaataatagctattctgactggtataagaggtatctcatgtggctttaaattgcatttccatgaaaaagaatgaaatcacgtcctttgcagcaacatggatggagctgggaaccattatcctatgtgaaataattaagaagcagaaaatcaaatatctcatgtattcatttataagtgggagctaaacaatgagcacatatgcacataaagatggaaataatagatactggagacaacaaaaatggggagagagagaaagctgaggattgaaagatgatctattggataaaatcttaattatttgagtgtatacggagagcccaatcttcaccattacacaatacacccatgtaacaaacatgcacatgtactccctgaaactaaaaaaaaaagaaacaagcattgtgaactgctggatccccaagaaaggcagatgaccataactaggaagaaaaggagaaaaaatgtgcaatgtcaagaaacatttttgtaacttatggtcaatcttgtgtttctgcaacacctatatcttaccatgtagaaatttagggatacaaaccacaaagattctgagggcctaatcatctctcctagacttgcttttgcattctggagtaataatctggaaaagcaataagagtagggacatatttatgattattcttaaaactgtgtgtagaaaaatacaagaatatctactccaaaaacctgcatgaagacatttgatagttagccaaaattcaagagactcctaatctttgaaagctacacattaggctggtgtatatgtcccattatttgaaattgcacctttaaatatttgagacatttatcctattatccctgattacaatttccccactacaattcactgcacagtgcttccttagggagctgcttaatacatttcaatcttagaaggtcaagattccctcagccaattccaaactgcattgtcccattgaatagatgtggcacattctggatctagtgagaataacctatgtatattactttgaagtaatacaggtaggccattatagcagaaagaagttgagtaaatgttgatatttaagaaggttgataaaatatttgaacacaactgcaatccatacccaattctcagtggttttttttatagaccatgaaatcatagctaaagtcaacttcggttctgccctaacggagagccacaaataaccctaaaccatagataactcaaatgcatttttacttggcttttgactgctttttatgataattttcacagcacattgctcttctaattatgttttgtttgggatcatattaaaattaacttgtatttagtgattatgtgctacctgatgagttaaagaggagccctgggagtgtattgaaaaaccaggctgtggatggccttcagtactttacacaaagaaaagccaaatagttaaaaaggcattaaaaatggaaaggatgtaactagtgggcaaatagctccaggacctcagttgcatgaacttagtatatctctttcctcctccttctcccctccctcctccacgccctctttctcctagtctctatttccccttttccttatcctcttcctccatcttttttattctttcttggaggcatggaaagcaactcaaaagaaaaggagacctctatagtacatccgcactcagccttggatagtgagaagtactcaggtctgagtagcctcagacagtggagtcagaagcaagatgaactgtcagggattataataggaatggtcagggctgaaagcaaggcaataggtcaaaacctggcaacaaggaaagagccctggataagtagtttccataaatccaagcaagacaatttgttaaggcttagcatgcaatcaggcatccaaaattccatgaaaaccagaaggcagggtgaggaaggaacaggaaccaggcagcagttctgtgcagtggcaccaagtgacagcaagaaggcagcagtactaccaaggcaagattacacccagccaaaaaaccaccagtctgcagggcagccaattgatactccaggcagagccattcagagctgaagagaaagcactaaaaaaaagtgcagccacttctgtgattaaagacaatgcccatggtactaaagtaccgtcttggagacactggtcatagttgttaaagcttccagccctcccagagaacatctctatgaaaaaaatactggtacagcagccccaggcccaccttctggaggttcagcttttaattttagttgtttcaagtgctgtggaaaagactagacctgatccctcagttcttcatattgccttatgaacactggccagaagggaagcacatccctcccttttgttaatttcctccaatattgctaagacaaggaatttcaaaatgttcaacaaatattaagaaacaaaaaagaaatgaataaagaaaataagatgggcaaaaataagtatgcatgcaaaaataagtatgcatgaaacataagttttcaaatatcatacactgacattgattaatcatcactagctgtcaggagagagtgctgtattgagaaggatttagcaacccagaatgtcctaactggcttggctcatgtctgctgtgggtaaaggaaaagcagggagtgctgacaagtctgctttgtatttgccaccctttgcaaataggtactcaccctattcccaaagagctaatataaattacatatcactttatttgtgtttgatttattacataattattattagaataattcacataattataaccagaagccccaaaagagcagagaccctgactgatttgttccatggatacctccagcatctagaacaggacatgacatatagtaccccttcaaccagtagttgcctgacttttctgccctcatttaatggatcctgtctctgaacctgcaggcatcatcatatactatcgtaagtgatttccttagcttcctaaacccagaaagaatccacattctatttctcatggtttttttctatctgtatagcagcatcaaagtgggccctggtttttagtttgagggatatgccacttctgcaaccagctggcataaatgtggcaattgacacgataagagaagctgttctcccagccagggaagaggcattaccaattacaggcctatactataactgtgcctttaacatcacttgcatgtaagaatgcaggtctctatgttagaagagtgatatctgctcacagcatctcatctcctcctcagctctcccagcatttgagcgctctctccgcttcgttttcaaccatggtagtctaatcactggcaaaccaccagtgagttgattgcagccctttataattcctgtgtagtgagatgccataatgacttttccaggagtttccacatcatctgtttactccatgtgacattccttccatctgtctactttcagtttattttactttattttttagtaacttcatatcgcagatgaaagtactgtgaagtttcttctcaaaaccataatatttttgttacgttgcatgataacctcaggaaacatgaaattctaagaatttaatactaatatcattttgggatcattttttaaagcagtaaaagactttatgttcatgttgtctcacttttcagaggaattcatagctttttattgatgtaagccatttcataaccctgtcaaggtgctttgaggaagaagttaactgattgaacatcaacaaatcctggaatgtttgatactaatgatctcagaaggggccctgcctgatctacattccacctgagcactccttaccaaatattgctcttgccttcctctgcagtgattggttctgatcactgtagagaaagcatggaagctcattttacaaggctgcatgtgtgtctggctgctacctagatgcatgtccttcttgcacaggtcaatccattctctggtttttctctcctttgctctactcccttacacagaaacctaatttacctgtttctttcttaagctcttcatttcagaaaaactcaataaggaaaattaaaaaacccctcctttaggatgtctctcttatttctgccagctttttgaagtatgtgtgctctgggcaggggtggggacaggaagtgtatgtgacaaagatcagtcagacaaaacactcctggcatgatttccattttagagttgtgaaactgaagaatgggcaggtaaactgatattttctataagttgtgagaccatgattcactgatttgtttaccttaatgaagcatacgtaaaataattgataaattattttatcaataatttggtaatttcctcttggggctaattgaatatagtgagtataattgagtatacggtgggtggctttcaagcgtatctttccaactttcactattttagtaccctggctagaaaatgataatctgatagtgaaaatattaattcatcctctacaaggttctgaagatactaacttctcagtaaattcagatatagattacaaccattttcaggatataataaagaaggactaaaggtatctctttggtatgtggttctttacggccacataaatggcttccaagtcttcatttccttaagttcatttcctgctaccctatggacattgctaccctctccttctctgggttacaaataaatggttgatggcattttaataacaaagattaaccaggttgccatgttaaggatagatgggagaagcagtttgggaaggtagcctagacaaggtgatggtcttttcaggaagttctcaggtgtctacaataggtagcagaattgggcctgagcaaaagtcacatgagcttacagcaccctgtgcagtcaaactctcaacttcacttaagctttttctttgctttgcttctgcccactcacctggcctgttaccacccactgttttaagcagctcttcagctgcacatctactgtcctgctctgccctgaaataggatgataggtaggactgctgtacccacagtttacatgtccttaccctccatgtaaactgtgggtacagcatttgctacctaccgtgcttctcaaataccggaagcatggtttggacagctgaaggcttagcaatcattccaagctgcagcatctccttgggcctcaggctaacacccatatcaaaacaacttgcgcggtggcgggcgcctgtagtcccagctactcgggaggctgaggcaggagaatggcgtgaacccgggaggcggagcttgcagtgagccgagatggcaccaatgcactccagcctgggcaacagagtgagactccgtcccaaaagaaaaaaaaaaaattatgatatttaaagagcatatttaaccattaaaatagtaaatatgttgctttttttttttcttaattgaactgtagtgtccttattgttttaagacttcatcgtatattctggatacaattcctttatcatatatgtgatctgtatgcattttttccaagtctggcttttcattgtctcaactgtgtctttcaaagagcaaaaattcttaattttgatgaagtctgacttatcagttttctttttagtcaattttgcttttgctgtagtagctaggaaatctttgcctaacacagtcataaatattttcattttttacattttgtgtttaggtctcccgtgcattttaagttaatatttttacatggtgcaaggtgtatggattaaggtttgagaacagacagacaggaatgtctttcagatttataaaacgtaaatgctatatagttaagcatttaataatcttttctgaaaaggaaaaaaaaatgcctacatttgaaaccattctggaaaatgtaagataatgtggttttcctaaccaacagtagtcagcttttaaatgcagtactttgactttattatcttatcattgagattcaccatgtttttatgtaccactaagaaagaaaaagaaaaaaactgattaaattgtttaaaaaaaaacaaaaaccttgaagacaattttagttacctccaggctaatcatttcctttttcttttctttcatcgcccctgaaactcccccaagcattatccaaggtgtgggctctttttggttagtaaacttcacttgtcatctcctttgagtgtgcttccccactctcgtcatcttctgctggcttaactcgaagcccaaatttcttacttgtagatggttaacaaatattccacattctctgcattttcttcctgcatttggaacctgggtttcctttaaggacaccaactccttgaagtcacactccccctttctcgcacgcatacacacatgctcagacaatgagggtggctatctggcagcttccacctttcccactagagttttcaaatatttgccacactatgccagtgccaaaatttatataataatctatccttcagaggcttctccccttgagctgctcacaatttacccctccttctaactcacaaggagttacaaggccctggaaatgtgcctccctcgacagccacaagtgaaatagtcaccaggttcatggtcttactcgaatccctgtcatgcagggatttcttcatttgcttggaatgactcatcaaacagcctagctttacagttccttgacctcggctcttcccaggacttttatctccatatgtcgacaggaatctactttcttggcacttgttactaactggaactgtatctattatcctttctcaacaagaacctctcatatctcagcatccttctaaggctcgcttactatttcacctcttctgtacttctaactttgagccttttattcccttcctatttgcaagcttcctaggcttcatttttaggaccccaatgttgatcacttgaatttccctttcaccagctcactgactctcttggcctttcaactcatcctttttacaaacccctggagcaggtctctcatcgcccttcaccactcctgcagccagtcagaacagctggtcaaatgaatacaggaatggactcactcattcataccaacggtgttcacttgacctgccataacagtgtgattctacaggccctgcaagttcatgctgactgtatatctcactcttctgcctcagagctagagaaaacaacactgaaaatgaccaaacctcctaatcaggaactggtaaattaaactgtttaaaaaagttctctttatatgtgtacatacataatatataacttcacagaagtgagcaaaagtgattacactgtatgtataaatttatggggagaaatgtagcatctgaattcttttcctttttggtttagtttccagttcccctcttcccattctccacaccaacatcatccctcacctcataaacctacacctagaaaaactatgtcaataatctagaatgtatctgggattttttcccaagttcatatgcttaaaaatatatacacactcatacatataccatcatatacttataaacacacaagcatactgtggatatacaggcttttgggctttgttttaaaagatgagatcataatatacacatcttctgtttcttgcttttgtcattagatatcttgtagatatcactctagatgaaaaggttctaactatttttagatctaattattaacttgttcctttgtataaactcgtaaatatttattgagcacctaccatatgccacactgaagcctgggatttattcaaatttcagaattgagaagggagtagagagattcatagtccagctctcttacagaatagatggaaaatcaaggctccgtaaatattcgtgatttattcaaagtcatgcagccagttgatgccatgtctcaaatcaaaatctagctcttgctagcccccaagtccagtcctcttttaatcatactattcagagtcccataaattagcatacaattacttacaatttaatgtgaaaacatactacaacataagataaatcttcaggcctggagtagggagaggatagggaggggcaaggattcaggaaatttcctgataatggtttgttgtctgtgtggatagaccaaattgtctttaatgaaccaaatttatcaaccagtgaagactcattaagatgcccagcatttaaagggagatcaataaaagagagaacttagtattgaaaagctatgaaagagctttgaatgaaattcactctccgtcttagcagagcgcttttcaagagtgagaatcatgggtgggctgtgagggaagatattccctggccatctaagcacatctggaaaggtccagatttcaaactgtcgctcttttgtcagtgctgaaaaacttaaccttgagcgctaggaagatgttctccaagatgctgaaacttgtcacgttatatgagtcttcatgttcataggcaaaacaaaacaaaacaacaggcatatacatgacattaccttcttttttgtttgagacagggactcgctgtgtcacccaggctggtgtgccatgatcctatcatggttcatttctgcctccaactcctgggctcaagtggtcctcccacctcagcctcccaagtagctggaactacaggtgcactaccctgcctggctaatttttttctttaaattttctgtagagatagtatttacctatgttgcccaagctgatctcagactcctggcctcaagtgatcctcctcccacctggtatgaagcactgtgcctggccttgaatttcttaatgatgtttttgtgaatctatttgtcaagagtacaactgccagatttttgtgcatttgtgcccctctgctccgaagtaccctgactgtcagtctattcattcagtcatcaaataactttggggcatctattctatgccaggcactactatggtaggccttcaataaagggaggctatgtttacatgggccttccacttcacaggcaagaaccgcactactgaatctcccgtgtctttgtccctccagataatttagtgtgcaccttatgaccttcactgacaaaatagcgaagaatgaacaaatgttccttaaagccagctaattctttggttattttaaagctgattggatcttttgtacacattctaaagactctaaagagagtccttgaaggcataatttcactgaaagacatgcaccacaaaccccctgagacatccaactgcagggaacacctcagctcagtcagtatgtgatgagctttcatgtcgcagggcacctgacagttggatgaaaaattgctttcagtctatgctgggttttctgtggcagttcagaagcaggactaggttctgggtctttactgtgtatgtcatcttttctttcagggttctgtgtttccatgcaaataattataatagtgtagaattatttgatacctactaagtgtcagatttcctgccatgtacttcacagacttttattctgtacaacaacattatgagtcatgtaatatcatccccacttcagaaagaaggttcggagaggtggggtaagttacacaatgacagaactacaagaggcagagcaggggtgaagctcagatccccgtgtctccaaacccaaggctgagaccgctggctgcactaccccacacagttctgaggcagaagagaatcaggaggtgaggatgggaactggggaaggggttatgttctgatgagttagtttttaaaggagagccagattttctgaagcagaattttaaacatgaataggacatgttaacttgatgttagtgaaatatttcctagagttggggtttattgttgaatactaaactcatgggagtactgcataccactgtggaaaggtgaacagaatgactttagggaatgtgacagtttacaaagaaaaaagtaaagaaaggaaggaaaactagaattctcagtcctgaccaaaactatctctaggataattatggtttatctaaaacttgtttctctgggtaatcagataaccctgctctctgtgagtgtagacttctccacatgctgtatgaggatacctctgtgtccctgtagttaacaattttaattataggtgaagtattcaggttaagtggcctaaattgacactttacatggagaaaaaagtctctcatgagactatatgctataaatacataattattcatatttaaactcaacattctattgcttttatatttgttttatattcatttttcacaaagtttcctttgcaattgattcctgggtgatggtattaacatgtcagtattatttattcaagacaagtggaaaatctcaagaaaaggctaaaagacccttgggagcttacctagtgactacaacagaactaggaattaaatggctgtaaagtgacatgttgtatacaacacaacataatttattatgtgttgcattaatataggcgttttgaggatatcaacattagctgaggaatcctgatgtctgccaattaccattgtttggtaaaagattgggagttctggatttaactgcttggtaatgaaatcaacggtttgcttcaagttaatgttatacagtagatgcctagctgatttcttgtttcccctactatctaccttaaacgcattctgggtctcccttcatctttgtaggtttctgagctatttttgtactgtctacatatcttgattagctaatctgtatattaaccatatgttctgacaagagttcagtgacatggaccctcagcccatgacgctcactaccactgacatgttgcatgtgagtggtggggggagatgaaattagtttattataatatgacttttgagaagatatagcaaaataatcctctaatccattctacagaaaaccttttgtttttccaactttattacctttcattattccatctcagctgttttcactttgtgagattgctagggtcaatgggtgaggatctgccatgggtgtgtgtgtgtgtgtgtgtgtgtgtgtgtgtgtgtatgtgtgtgtgtacttttcactgtcaattattctaagaaaagcaaatgctaaagtgaagtgaaacagacaatggttcacagtaaatatcaagctgtgtttgtattgctgccatctctttgggagaatttcttatctgttcctacagaaaaattactggaaatatatatcaatgaaaacgtataaatgaaatcctgaaactatataagattcatatctcttgattatccaaaatagagacatattattacttatgaagatgaaatgtttgtggtttgatgctaaaacatttagtactaataattattccatatagagtgtttgcattaatctcgactacactaattcagagcatgagctctttgcctttgtgcatgaagacagtttcttgggcaaattaccaatgtaatttcctcgttgtcattccgcaaaccatctatgttcaaatattttaaaagcagctgtacagaaccaaataatttatattttaattctatataaatcaacatatacttctttacttggacattaccattttaacttcaaattcaacatgtctattttgaaacccttgatttccaggataaatcagtctcttgctgacttcccttctcttttgtttgtggtagaatgattcccctaatgttggagccttaaagtctaacttagtgactcctctcatgttttccatatctagtctggggcaacatccagaaattcttcctgttctgtttttcaactatctttttagttttatttctagtgccgccatctcagacctctactaattcattggaattatttttcatctctctgtctaccatttttttcttcttccaattcatcctatgcatcaatgtcactctattttttcatatctgcaaaccactcagtggacatccaatatacaagcaaaccaattataggtgaaatttaaaaatatttattgtaatttataaaagaatagtaaactaaaaatgaatggtaataacagcaattataataatggaaaacaactatgatgctaattaggaggaggaagaatgttttcaaagtctttcaccaggtatcgatattcatctcaaagagtttgaacaacagattcaattctgtgtagggaccatttcttcatttattctttattcctactaaatcagaaataccaaattcataagtcatttggaagggtaacaaatgtttgatggtttgtcaactagtcttgacaaacggattctacaatgtacagaaattatggagacagttttcactgatagatgttcagtgcctcaaaggaaactcattaagatgagggaatgccctctcaaatgtaacaggattgttgaatatatcaacacaaaagatcactagcaaatggattcctaatgaattcctggttgaatttgcctctgataattatgtattcatattcagtttgagcattcagatgtgttaaatatggccaataatagcactgatttatttcctcctttaatttagaatatctttaagtagttagaaggaaacccttgttaactaatccattgacatcaaaatttaactttttaaggaacttttgctgtctctcactaaatattagaaatgatgatatgttgttcatgaagtcataaagtcaggcttctccactctctgtttgatttttatgtgtatgtgctgctcataaaaatcatcacactggtagagattcttgttctcacaatgcagattcacagtgtattttctccctgaaaacttgttattttctttggaacctttatgccaaatgatatataatttgcagtactattttcatgtctttctacttttacatctccgatggattaatgttgcagcattaattcattttgtgtgagttggtactctaaaatacaataaggcagacagctttaaacccatgtgatgtttaatatcctacaaagaccaaagagtcatagtggatatttccctcaatctaaaaataagggaaaatactaataagcaaattatataaaaatgaatctgcttaaatagacagcaccctgtttgccagatgttacctgagacaaccaatccatatatcccatgtatgtgagatgtttaaaaatgtaagaattactaaggacatgataaatttttatgagaatcataattaatcatatagttcaaatttcatggtgcctgtctattgccaacccctagtttttcacaggtttcacattggaaagcaatgggttgtcctttggcttattttattttagtaattaactgtcctttaaaaacaataaaactttcagccttcagtgactttgataacctatgtgataaagtcagaactcattagcctgatattcaaggtcttcccagagaggctccatcttacctgctctgacttctgtcttatacctgctgatccacctggggtgtctgctgaaagcaggtcagcacaatgactcagattcttccctttctttccctctcccatgccccaggatttgtttgtacaactggcccaggaatcctgacttcatttattctctatgggttaacccaggttcttgcttgtgaatggaaacaggataatggagctaaacctaaatggcattttctaaccatgtcttcattattcattctctgaaccatcctctctaatcagtttttactgatttcttccccaaatatgcatttgctttctcatttcaacttatatttacactgttctattcatcagaaatgtccctgtcttgtctgcctcgtcaaattcttcaactcccaactcctgtcttacttcctatataaaatcttattaggttaccttagctgaactatcttcttctttctggaattcctattgcaattacttttgttgtaattatttaggcagtggtttctttgatatcatttactgtgttttctggcaattgcactgaaattgtatactgctcttcaattaatgattatctatttccccaaactagattttaagcaccttgaggacaaatattgcctcatatgcctgtatttctgttccaggtctttggcatactgttaataatgaacaaatattatattacagtaaaactgtatcccaagattttctcagactcatctaaaatataggcaagaacttaataacactaatatgcctgttcaatgaagcattctattcaaaatgttttattaattctttacagcttcctcagcatctgattggaatcagtggcattttaatttatatgtctatttaacaaatactaatatagtgtgcactgtgtgttactcattttctatgcactttacaaataataattttatttaactttcaagacaaccatctgaaataggtgctattattatccctgttttatgtatgaggaaatggatttactgagaagtaactcagccaaggtgatggaattagttactaataggttcaggatttgaacctacatttttaaccactgtgctctaggaacttagttaacagctttaatgaatgaaatggttctgctaattgatgtaagaaactacttacatgttttgttggctaggtcacctgtcactctcagttcagaatctttcaggaaatgtcctttagtctctggtgggaggtgtactgcaactaaccgtcctttgaatttatgttgccatgtacagtccctgtaattttatttcctctttctatctttacttttgggatctaagcttccttgaatgtttagcctttttgtctttttagaaaatattgttccctttatgaatatgtctcttaattgctagagtttcctaatagccaaatgaaaattacattttggcttagaaaatgctttcatctgtatccactggctatatatctgcaaccaaagtaaagtgtggaattgggtatttgttgtttgcagcatttgagcagtgtacacatcaaatgtggttaattctattaccagtaatatttctagtttcttctaaaattaccataaaggtttaggtctagattagataattatttccaatcaatctcctttcaagttggaaatgaatgaagtcccatgttttctgtgtgctatttcatatattttggcatgataattattaatagcaatgtattactattgctcttttgcttacttaaaagtatattttgcagtggtttattttattctaggtgggagaataacacgttgatatcttcttgaaataaaaattatatgtcaatgaatgtgacaatgttctatgtaagtagcaatcgaggaatgactgaaaagggattattaaatatttcaatgcatgggaaaatatttcttctacctatttactgcctaaagtaaatgctaacccagaagatatttatgtcttggtttagaaatctgtagagtgacagagcaatctgagctctgtaatgtatgcaaaatttatcaggctcagagagacatgagtatgggactttggccacataccatacctgtgcccagggacaactgttaggaaacattttgttccagactagttgtgtcacctattatcttcatgttcctggaatttgtgatacaaagaacaatgtatagccaatcgatagcttatgtatttgaaagtatattcttggtaaacaacttaggaactgcctcttgtttttttcctaaaaaaacccacttgtaatggctggtagttggagtgtataatcagagcaacttgaatctacgctcctgagtggccatcttcaacaatcaccctggaataaactctttttaaactagaaaacaaaaacaaaggaaacaacaaaaaagaagaaatctatagagtgaactatatttttccaccttgcaaatagaaggggcaaaaatcaaccttgcctatctgatgatttagtgtcatagggattccaaaatgttatttgtaacgtgtaccttgatatgctaatggtgaaatctcctgtttcttgatttggtcttctcatcttacatttcttacctcaaatccattctgcgacttcaccagcagattaatattctttcctggtctcttggaattttaataaaaacagcatggtcatggggtttcatgaagcttgcagccctctgggggatgcagataataatcaatcaatctcataattaaatgtaattttaaataagagcttacaaaaaaaaaggaatatggtgataatagagcctagacaaagggatattacccagttagtagatgtgtatatgctgggcaaagggattgatatttaaataatgtacaggagtcatctaatcaaaatggtagaggtggtgggtgaggaaggatcttttgtgaaaatggaacaacatgtataaatatataccatgatgggcaggagcacagagattttgagaaaataaagctgtggtcgcagtcacagctcaaggagacagtgggagaagggaattcggtgaactggtaaaggtggcaggatcatttggtacctcataggctctgattaagattcttcctatatctttagagctgttgaaactcactggagtcttcaacaactgagtgacaggattagatttgaaaagatcattcttgctatggtgtagagaatagtcattcttagatcattcttgctaagtcttccatgagaaagtgagtaacatagatttgaaaagatcattcttgctataatgtatgaaacagttgggaagaaggtaagttatgggaagaccatttgaaggctatcacaaagagaaattctgatcatttagattaggtgatggagagaaaggatgaggaacccagaagatagtgggaattaccaaggcagagatgtggataatacagtccatgactatagaacaggaagtgctgaaagagcatgtttctgcacatttagaattaagagggatttggagcatctggagcagaatttgtttgttgggaatgatgactcgggagaggcaggtaggggccaaattatgaaggtccatttttgtgatgtgatggcaaaaggaacaactgaataaattgagcagggaatcacagtcagatgtggagtccagagaagtctctgatggtgtggaggatgctccacatctctcatgaaattaattgagaaactgctatttttttcatctaagagttttaattatctttcatttagttcccagaggctattgggcataggcacctagtaagtaactgttaataacaacatgcttattttgggcatggcaatgtggaaatttattcctgccgagtaatcagtgccagttttatgctggcagggttttaaaagaatggagaagggattcttttgcctccattaggagaaagctgtgccttctcttcatcatatagtgactcattcaaggttggcacaaagtaactttaatcaattaatgtgaataatatcatacctttttaagcctaaaatggatattagaggctatcagccccctggaaaaaagtctgcagaatatttttctttcaatgataatgtcatatatatcatagcccttgaatctttccaaaacatttagtcaatactgaaaacatccctagagagacactcatccaatttctcacatgtgaatcttttatctatctttggaaaattttaagaagtgcttaatttcagactgcttttataaaggacataactagtagcatggtaaaagtgcagtccatgaaattaaattcctgatctgaacctcaggtcaattaacttctaaaaatactctttttgagacaggatctcactctgttgcccagactagagtgcagtggtgtgtgattatggctcactgcagcctcaacctcccaggttcaagtgatcctcctacctcagcctccagagtaactgagactacaggagtatgccaccaaacctgtctatttttttaaatttttttgcagaaatgggatcttgctatgtttcccaggctagtctcaaactccagggttcatgtgatgtgctctgctgggtgctatactgggctgacaaaggtgaataacacctaattcttctccaaagagagcgctcttcaactgatgagggaaataaacaggagagcaggcagtgaatgatagagcagtatcagaggtgctaggttgaggatcttcacaagcttctaagtcaggacatcctaattcaaaccaggaaggatcaaagaagacagtaaagataatgaccacaagttgagtcttgctataagctgaatctggaagatagaagtgaaattgtccatgaaaaaggaagaaagaagaatgtcgaagaccaaaggggaaagagagtaagacaaggtaaatcaccttttgatatcgttgctgagttgtgtgaaaggctgtcaaagtgggcagaagtcatgttcagaagagttttacattcaaattaaggagtctctgttagacagctttaaatccatgtgtctaatatcttacaaagaccaaagactcatagtggatatttccctctatctaaaaataataaacttttctttccaaagggaaaaatttttacttatgaaaaatgtggtaaaatatagaataggaaattctgaaagatacaagttcttcttgaacaatgagcaatgtaaaaatgataaaattattgcatgatacaatcttttttaaaaaagagaaaacactgagcatcttttccttaagccccctttcataaaatctcatattttgcccacttctccatcttaatgattgtggatttctttctcaagacctacttaatacatctcagttggaatttcgaaatgctggcaagtctttaaaaatagacagatgatgaccctaagacatttggaacttatcctaaaggctgaggcacagtagagaaaatatattgaataatatacaattttggtcaggaaatgaggaactgctaggttagaggccccattttctgtgtctggacactggagagaatgcttgtgtttggtcctccaattaagagctgcatgatgcctgtgccctgcaatgccaacacttattgggaacccataacctttgcttctccaacttctccagccaagattatgatgaaaaaagaggcaaaccacaattgccaagtctgttctcagcaattcgttcactggtctttcatcattaggcacattgcccctgtgtacctttggtcccaacgcataaagggatcttgcattgtaagcacatcatatgtttatttaaagaattttgaatctttgcagctcttattgactgttcagcagtgaaattagctgttgaaaagcatttgcactgggggtcgtttctggaaagaaaagaagtatttcttaccttcttctctaagactgcacattccttgggggtttacccatttgagactgcaagaagatgaaataactcacttttctctattaaaaggtgatctcaattgctatagagagaagaaataaacaattattaatattcctgtgtcagagagtgtttataaaagcaaactgtgaggttcgtaatctgtttttagacaagaaaaagatttaaagaatgacttaaagtgatgattataagaaaataaggagaaaaaggagagagaggagaggttaataggtaggggaaattgattctagaccaagcacttaagaattctagttctatgtttgatttcctttttatacatcttgcactttgctctaaagcaaaggagttacaaaatttttaggcaaaattttctacccatgattagcgagcatttatagaaagaagcaataagttctttcagttgaatacacccagtacctctaaaaattaatgtaaagagcacatttcatggtcactaaaagaagggtgcaatttaatgtatgatgttaccatttattactaagaggacctgatacacaaaaatataaattactttttccatatcttctttcagcttcaaatgattttgattttttttttactttagatactcagagtagaatttataaagacatttggggagtatttctacctcaaaggaaaacaaaaatataatgacatttaaccatttcagatatttcatgatatgtagttagttttgtgtatgtttctactacattaaaatatccaatttattggttgtcttgaaaggcttttgttttctgcagagattggatttccaaatatattaaaataattgcagtatttatattgtccgttcttaggggctgtacttatattgcatttctttgcagagttattgatgatgtatccttgttctgcagtatggcacttggcaaaacattgcttcctagtttgaactctccaatgtaaccttcagggggaaatggttctagaataccattgcatcaactcttttagcaaattgcattattagacatccatttataacttatcctctaagtgatctcagtcgaatcatttgctgtcttggtttcacttctatgaaatattctagagcaaatgctgcccttgcttgtgtcataggactgcagtgttggatgccttctgtgaagttcatttagcccctcataatatgcattccatgtaactaggagggaattttctttgggtagatttctcagataagttgtaaggggtggtgtgactggctaaagtgcatcagtaagagatcattggcttgtgaggagtgcaaaaggcaggcagacaaggggaagaggaagtggaagaagccctacacatattgagcaccagtccacaccacactccccatgaagcacttttcatacattgcctcatgtagactttgagatgactctgaaatctgggtgttattagaggccagagatctcaaaaaacttgctctagacacttcatacaaccggtaaagggtagaattggcatttgacacaaatttgactgcctcctaaacttaatacattttctgcaaagttattggagacaatggagcatgaaatatttcttagtttcaggggttgaagtatcatctgcacttagttttcttctcaaataagataaactctaaacaacaataagaaaagtagatttgtgagttttgtacgaattggccagctattaatatcatttggcattctaaaggaagaacggctgaagtaaaccacaggtgcagatcaaatcttgatgtctgtttcactgcaggagacaaatagaatctctctttcttgtatgcttctgttatgttgagtctaaatctgaggtaatcatgatcatttcaacctgaggtatggtttactaaattaggagaaacatacaaaagtttgttgacttttaagctaaagaaggcaaaagccataagtgaaacaattcaagtagagtgctataatgtgactgtttctaatgacaacttgaattgattgtaaaataagtctggcagttaaaatgtattagtgttggctgagcatggtggctcacgcctataatcctagcaccttgggaggctgaggcgggcagatcatgaggtcaagagattgagaccatcctggccagcatggtgaaaccccgcctttactacagatacaaaaattagctgggcatggtggaggctgtgcttgtagtcccagctacttgggaggctgaggcagaagaattgcttgaatccaggaggcagaggttgtagtgaggtgagatcacgccactgcactccagtctggtgacagagtgagactgtctcaaaaaaaaaaaaaaaacatatatatgtgtgtgtgtgtgtgtgtgtgtgtgtgtatgtgtgtgaaattatgacagaatttacctgtaaggtgttagtcatggaatactatgcagccataaaaaagaatgaaatcatgtcctttgtagcaacatggacgcagctggaggccattaccctcagtaaattgaggcagaaaaagaaaaccagataccacatgttctcacttacaagtgagagctgaactgagtatgcatgtacacaaagaagagagcaatagacactgaggcctacctgaggatggaggttgggaggaggatgagaatcaaaaaagctacctatccggtactatgctctctacctgcctgatgaaataatttgtataaccaaaccccagcaacatgcaatttacccatgtaacaaacctgcacatgtgcccctgaacctaaaagttggaaggaaaaaaaagggatagatgttagattattccaacctcagcattttaaataacctctatgactttcttagataagtaatagtaataccaaaataattagagagtggtagagttccatcaccaggtctttaccttcattttaggaataggttaaggcatcaagagataaagtaattaataaaggattatgctgtgatctgaaacacaagtacagtatttgtatttctgagctaagactaaagtccagatttctttcatttcggtgcttgttcgtttataccacactgccccaaaggacactaactgtaatagtactttgtcctgacatttaggacgcactcacacccttttgtccagatgtttctgtcttagatttccttactaaacactaggattgtgaaacctttcctttcctttctagggacaaaatggtattcactggcatatctagtttaatgctttgcgtacagggtgtgccacagacaattgggttaatggttgtaactggttaattgattgacacttaattttcagagttcgaccataactaaagagagatgagctccttgaggagcttcccactcccctagtcctcttctgctgaaaactactgggtcctcaatttttcctgaatacaccgctcatgtggccacccctaactgacccagttgaccatggatccaatttcagccactttgtggattggccaaaactctaaaaggaagcttaccatcaaaatttctgtccaaaaaggaatgatgaacaattatctaggccaactgaattcttctttactctggtactgaaaacatataaaagaaaggaggaaatctgagaccacaaggtgggaagggttataagaatttacagaagtcacaatgatgagaaagcagaagatatgaggtggagaaggtaatacatacatagcaaagaagttgatatcgactagatatggcagctgcagtgaggccagagatccactgaattgctgcatatcacaaaagtggagaaataataaacacatgattctgagggaataagttagcctgtatacttgaggtgccttagatcctatgcttttccagttctgcttcccaagttcatgtaccattccagcaaattccggaattcttttcatactattcattctacaataacttgacccctctttttgttgacgatgactttctgttgcttacaataaaaagaccccagtagctgggcacagtggctcatgcctgtaatcccagcactttaggaggctgaggtgggcaggtcgcctgatgtcgggagtttcagaccagcctatccaacatggtaaaaccctgtctctactaaaaatacaaaaattagctggacatggtggtgtgcgcctgtagtcccagactcaggaggctgaggcaggagaatcagttgaacccaggaggcagaggttgcagtgaagccgagattactgttgattactgttacactccaacctgggtgagagagagactctgtctcaaaaaaaaaaaaaaaaaaaagaacaaaacaaaaaaaagcctaaattatacaacaggatccatgggagaacatcttgatagctttttagcaggaacatcacattccaaatgcttgctagctattttctgagtatcagttatatttaccatgatcctgaggagcagaccctttattgtgtcccagttcagtttgcatcgtcttcatacagcataaggcaacagtgatagaaataatctctagagtaatctccaagtacctttccaaagctgctatgcctcaagtacttcctttaacctttaagcgtctgccttgcatacagtcctcttgggccactcttggcaaaatatttggaaggagatctggaacctgattatttctcaatgaaaaaataatttgcttttgcactgggaagcgacagtaatccaatataagcatgccattgaaaaccttcatgccctactatttcttttaggacttttgtgaaccctttctctttgatacattacctttggcaatcatggtattccaggacgtgccaatgaagttggctgaatctgaatggtcttggaagagtggtttgtggttggaatttctcttgcttgttgatatatgtactttccatgttggactttgtgcttatgtgaattctccacgtctcaaaggcattatgtctagcaagcaatttctcataaattcttatccatacagttattctatgagagcattgcaaatatagtcagattaggctttgatttgtttttcattctaatgctatctaacaaggggatgttctgatttgtgtagccctgtgcctccaagaagttaacggtaccagatacacagctcatttattttcattgtgcccatgtggttttctgaagtcacactttgtgttgttttacatatgggaaaatggaaacctggctaacttgtctttagtaagtgattggtggagaaattagtagaaactacatctccaaattcctgatctaggtaatgctgtttcaacaagctaagttgcatttgaattttgaaatacccactctagattgcaattaccaaatagttgttatgtacccaatcacaggatatgcttttgaaatttttttcattagtacatggaagagagagttttatattgtggtaggtagaaatgcccagacaagacaggactgagataaattaatggccagtccatttattttgataaacacaaataggactaatgcaccttgagctttaggaactagcagggcatttctagttgcagcatagtcacactaaggtgcaaagagtcaatggacaagcaaaaatgtgtaagaagaaaataagattctttgtttgttttctttatttgacatatttaaaagaaggcaaaagtgtatcttccaaaaagtacattttgtggtagacacttttcctctgctaaaccatatgacatcaagtggcatcccttttcttcctttgtggtcattctaaccctgatcccagattggacaaggttgaaatatcagcatgaagtgaagttggttctggttaaacttttccaggattgtcccatcttccagtccttgtaaatgagtgtcatgctttgttgccaagtcaatgaggagacaatgttcacatggagacccttgggcacagatgaaactggaattccttctcacccatttcatacagatagtatgaaactcatttcaactgagaagtgaaaattctggttaaggaagaattggtacttgaaagttgttactttaaaaaattatcttgattcatggttttacaagtcagttataaatgttaatagcctccatcactgtcatgttagctgttgtttcagaaaagaaatacatattgtagtagttttaatagaaggagtaggacagtaaatgtaaatgtctgtcctaatggattgttttatacattagagaacaattttttaagtgatcgagtaaacaaagtccccctcctacctccacggtgattgtttctcatagatgaaaacagttttctcatcctgacgacgacaacaacttcttcttcttcttcttcctcctcttcttcttcttctctttttctctttctttcctctttatttttcttctttctttcctcctcctcctcctcttcttctgctgcttcttcttcttctccttcttcatcatcattatctcatcatcattatcatttcagtgaccagttagtgagcaccttcatgtccaagcactgtctggggtcttcacagatgttatcctaatcttcacaccagtttaatacaagtgtgttaatatatttgatatgagtgctaggatatagtatttggagatgagggaagctaagctcaaggtcacattctgctggaactggatttgacaccagagctgtctgattccaacacccacactcttccctctgccatatcctgtgggtgtgtatcaagttttctcccttgcctgtggataggttgcctattttttaaattaagctcactctttatttctttccttctccctcctccttccccaatttcccttttctccttctctttctttcatttttttcccaagatgatatttacctgcaatacactattgaaaatttctctatgcttctgccctgatctaatacaatttttatcaagggaaaaataacatttactaactaatacctttccctgtagaacctgatagaaaataaagcataaaatttaaagtttatgacacactgcaattcatccaagggcgtctaaatgttcaaagaggcacaagagagagataatttgcttttaaaagaaaatgaggccaggctcagtggctcatacctgtaatccaagcactttgagaggctgaggtgagaggattgcttgaggccaggagttcaagaccagcctgagcaacatagtgagatcccatctcttaaaaaaaaataaaaaattagccagctgtctatttaaaacaagaaagaaagaaacagaaaatgggaggaattcaacttttgattagattgtattggatttctgaaaggaaaagggggtaccaaaaaacagagaatttgttgattaagtagtgtttaagagcagaaatgtctgatgttcagtttaaagatgcctgcactgctgtgatgtaacctctgcttgcctgatactgaactctaaccatgtgtatcacatcctagacaggggagggaatggaggataattgacaagaacagcttttgatgttaaaactaggagccaaatgcaggcagggaatactgtgggaagagagcaactagagttgaaaggatggaattttccataagcaatacaaagatttttgatacctgactcctacttaaaattaattcgactagaaagactcatctttttctgaaaaactttctaatcatatatcacttattttagttccacatttgaaagcactgttgccacaaaatcacctattcttttactgattttattaattaataaaagacattgtgtaggacagtatatttgtcataattatgggcagatataagcattagctccattgcaaaataggattaaaactgaatgtacagtgttgtcaagtatgaaatatttttcccagaataaatgagtagagaagcatttaaagtctccaaaaactccaaggggcctaagtgggctctcttccaaaaaaataataataacaagttatgatcatattaccctgaaatagattcaattacccaaacaattagtcagctaacaaatatttatcaaggctcactcttctaactgatctgggatacagaaggattgtaagaattagtatcctccctaatggagttttcattctagtatgagagacaaaagtaacacttaaaagctaaaattgaatgagttagttacaaagtctgtggggttgactcgagtagagggtggttgatcagtgtaggtttaatgaaattaaaatgagtaagattctataaatgcaagactggccagagaaagtggggagctctggggccagaacagcagaggaccaaaggcatcctacacagccaattaaggaattttcctactgaagcatggggtccagggagcttcatttgtaatcccttgttctgctttgtttcattcttggactctaatatggtttgactgtgtcctcacttgaatctcaccttgagttataacaatccccacgtgtcaaggttggtgccaggtggagatgattgaatcatgggggcagtttcccccatactgttctcctggtaagtaaataagtctcattagatttgatggttttataaaaggcagttcccctgcacaagctctcttccccaccactgtgtaagacatcccttttctcttccttcatcttccattttgaatgtgaggcctccccagccaatgtggaactgtgagtccattaagtctctttcctttataaattgcccagtctcaggtgtgtctttatcagcagcatgagaatggactaatacagactccatcacagacctttgggctaaggactttacctctaggcacctgccctattacttctattaaatggtgtaaacacagtttgctcacccatgcaattgccttactgtgattcatcttgaagtctagcctgatgacagggatactatgcaccccacaaccaaccctactgagtaattggctccattaaaacaagagagaattgtgagataatctggatagagttagagttcacaccaaacatagagtttccaatttaatggattagtttcatttttgcaacattcagtactgataggatgggtcaattttggcagggtctagttgccatcttaaagcgaggtacagggtgctatttagagcactttgcagcaacaaagaggacaaggtttgaggataattctaatagctcttatacaaagatattgaaccaagtaaatttataatatgtgggtctgcaaagtattcatgtttcttgagaggagtgcttcagattgagagacgggagcaatctgtaaagaaggaacccaatggatggacactggggaatgaatatcaaggacacagttaggtatgaatttaagctagatgttcacttaggtaactgtagcctggagtggaatgacaggttagaagaagtctcctaggctgggtgcagtggttcatacctgcaattccagcactttgggaagccgaggtgggaggatcacttcaggacaggagttcaagaccagcctgggtaacataataagatcctgtctctacataaaatttaaaaagttagttgggcatggtggcatgtgcctatagtaccagctactcaggaggctgaggcaggaggatctcttgagccaaagaggtcaaggctgtagtgaactatgattgtgccattgtactccagcctgggtgacagagcaatactctgtctcaaaaaaaaaaaaaaaaaaaaaaaaagacttcaaatagcttacctatgaagaagctgcttggtaataccttaaatttcccttctatgcttttacacagaaccctaaccttgcagttgaggacttgagtcatctcacaattcttttgggtaaaaaaaatgtaaactactgtgacccaactttctttacagctgggaaggcctctatttgattgaaaatataaattaagatactaggttttaagttaaaatattaaattacctctagcttttaaaaatcataaagatctttctttaactaacagtagagggatctagtgtttcaagtattgaattggtttaactgagcaatttctgaatgtcaaagcaacagattctctaataacatcttttgtttttctaaagtttattcccatattatgttatattatcagagagccatgtaaggggactatcttactttatatccccatagaatttccttcccagagttacaatttaacattttgtcctcagcttttttatagaggtcaatataagaaatagcacaggaagaatctcttctcccctctgccctttactctgggcagaattaatcctttacttgtctatgtatatactgtgatttatatatactgctatggtagcacttaggtaataatattattgtaaggaattttgctgtctgagataaatcttccctatattctcccctttgttttactccaaaggactataatcctgcagagtttttcactaatgaatttaggcattatttttctctaaaagaaagatcacactgaaaattatataaaataggctgttttcctgggatacccttgtggcttgttagaacacccggagtcagctggactggactgccactcttcttcacttactttataggcagatgctattccttttagagactgtctctgaaagtgaggaccctgggttatgtctgatcgttgggcggggagggggctttaaggttctaatttttgtatgtgtcctatttccatgtcttgtttcccagataaactatttccttctatgtctctgctttcctgaagacaaaggtacctttttctcagcagtggagttggagaggaaacagattcaggaagagtccaatattactaccattattgcaattgcgtagtagtacatgccaaattcaccctgtcttttcattttacttacctttctcttgtcccacatgcttttattcttggcatgcttacctacaaaattatcctttttttctatttccgtattccctatgccctgtagtcttctttcaaagcccctttgaaatgctatcatgaaagacggatttcttttctcagtgctgtgagcacctccatctcctcttctcttctttcacggtgcccatttcttcttcatctcatcaagtatgcagtcctttcttcgtctgcactgttatgtacctccttccacctttgtttcttccaaacttgtatttcttttgtctttccatttaacaggcctcatttcttttatcttaggaatctattcataaaatttatacagtctttaaggtgcaaacaccttgaaggtagagaccatattatttctatgttctttatattggcactccaattaaacaaaagtctatgtccagttgaagtctggaagcctgataagcacactgaagtaaaagtcgcaatacacatgaatgactgaaagtaggttttgttaccagtggaaaagacatttgtgagaacaaaatgacacataaagaggaagcaagtgattactgacttactggaaatcccaggccgggcacggaggttcattcctgtaatcccaacactttgggaggctgagatgaggggcttacctgagctcaggagtctaagaccagcctgagtaacaagtgagaccctcttctctaccaaaaaataatttaaaaaaaattagccaggtatggtagcccatgcccatgcctgtggcctcagctactcaggaggctgaagcaagaaaattgcttgagctggagaggtcttccagcacctgaaagacagagaaagaccctgtcttcaaagaaaagaaaagaaaagaaaacccatacatttagctcaattgactaaaagcctaaatgaaaaatatatatctttcagcttaaagggttggttggattgatttgttgagtaaggtattactatttggacaattgtaaaaaggacctgtgaaagccatattttggcttggacaagctcacccaccccatgccccatctctactaagggggggtgggattcactgtcaaaagagttcttctctttaaattctatacaataggtacagtaattatatctaattgcatttgaaacacaatagttattaaggcaaacgtttctagactagtttcattattaaataaaaattgaaactgagagtttttcccatattggtaaatattgatttaattttttaattgaatgggaataatatgggcatttttttatcatttgcccaaaatattttaagaaaatactatatagtgtaaccttttttttttttttttttactatgaaggcattaattttgttttatttttagtacttgcttccagttcacttttcaaagtgtcctttaggcttgttagtttcaaaggaaataatatatttccttttgacttaaaatgcctatgctatcattagatattaatagtagaagtaacagcaggattgcctggcacaaatttgtcctgtccttcttctggctaggcaatagggtgcaaatgttccttgctgtgcttttgatggtgaaatagaaataacgcttcacattttataacacattatatttcataaagctctttcacattcatcacttcatttaatcatcaaaaacaattctgcaaactgatattatttttcacatttaagtgtgagaatattgatgctcaaggaagcaatgatttggctgaggacccaaagtgagtgtcagtgccaagacttaaatctatttcttctcactcactccagagtccttcccacatcatcacactgtctccttctactgtgctttgctctaacctgctgaactaactagcaagtgtctttagcatactacattagatagctaagacttactgaatgcctactgtatgccaaatcctgtcttaagaacttacatgtgttacctaattcaatccttgcaacccatgtatgataggtaatattattatctccatctcgcaaataaggaaacatagaatttaaataacttgctcaggaaggcatagccaataaatggaataagtaagtctcaaatctggacagtctatcttgagaaatgcatgcttaatcaccatcctctattgcctcttaaataatcaaagcccgtaaagattttataaatgacttttctcatgaataatagggcctggggtgagtttctcaatatcacttatggcaataagaatttcagcaatcataatcttggtgcattttccaaaaaggatggctccccattgggtaacacaaggtgaaatgtgtattctgttagaaatttttgattccagcctagggaggtatcaagaataatgctgttgccataaagatataagtcttgagacaaacactggagaggttcagtcattcaatcaactatacatatattactgaacattttttatgttcaaatgctgtgctaagtatctgaataatattcacatgaagctgaaaatctatcaaaaatacatttgaatacagatacttggtaaaatctctaaaatgcacaaagcttcatggacacatgaaatttctttactatggagaaatcaaggaaggtttaataaaagtagtaacattagagctaatctttgggtaaagaagaggaaaagacaaattgtagtgcatgctgtaactgtatataggttctttggagatagctcattgaatgcaaactttcagaactcacttcatgagtcaataggaactttacacaatggtgagaataaagtgcatcctttcaaagcacactgtccatggcgtgagagtaaccaccacactgacatttgttgaagaaaggttctcctgggttctccccactctaccctccttggatgccaattaggcaccttaggaaggacaagtgtcttccctgtcccaaagaattgatttttatagatatttatatctacttttgtgaacatgcaatgttcattttgattattattaaatcaatgtaaattctgaatgaatttctctgacttttactttgcttattaagttgaagactcaagggcaatgcagatgagaatttcagattcttcctttgagaggatttttggtcagtggctctttaagaagacccaaagcaggttgggtatacttcgtaaaatcagatacttggtatatagttcttttttttttcttttctttttttggtaacatcaccacgaggatttctttgctgaaatgcactgaccttctgtaaaaattaacactggaagtattttccaatggaaattgactaataaagaaatcaataatgaaggaatatttttagactggcaagaatcatgatgacactgttaagaagaaaacattgtacatatttaatatgtttaaattccagatcctcaatattatgattaagaatttaatgatttttgtttataattccttctcattgtgtgcccacatcatacttagcttaaattatgtatctaaatatgtcttctctataaagtttcttgtggtcagaatcaagtggtccactagtttcatttagcagtagatgtatatattttgacacataccaaagaagtgcagctcagtacccaaaagatgtactaactgaaaactttagttcatgtaatatgcccggcattcaccctcgcggaatttagacaggagggattgtggcctgtatgtttgacttctggaacttaccttagtaaaattcaaaaaacaggttcattagtaatttcttcaaagaaatctgcttcaatttattcagatgttttgtagtctctactttgtattaaatataaagcactgagttaaagaggtaaaaatatcaaaatgaacaggatagtctctctcctctgggatcttataatcatgtaaagaaacagatatgtaaaaactgtaaaaaagatatgtacaatataattataatataggaaaattaaaggccatacattttgtaaataaacagctatgggaacaaaaaaatgtgcatttttttttctaattggcaaagtctaaatgggattgtggaggagcagtttgtatttaagcctgcaattgaactacatgtattatttttaaaactggagatttgaagggaacactggtggcaaatagaattgtatgaacaaaggaacagagatttggaaaggcagatggatgtcagcatggctagaggacaggtacacagctgatggggcagaaggtagctatgaaaggtttgcagaagtcagattgtcagtttcttttaaagcctgctaaatgtgtacactttattgtgtaaacagtggcaaacagtaaaggttttgaactgtaatgatgtagtggtctgggctaaactattcagagcaagcattttaggttacagtaactgaactgtgggtttttgtttacatgtatccagagttgttccctacctttgcaaggtcagtgtctcagtgatgtgccttaaataccttgtccttgaaatagaacctcaacatcttcaccttgttctttttttttaaaagaccgtgtcttactctatctacaggcatgcaccaccatgcctggctaatattttatatatttttaaagatgggacctcactctcttgcccaggctgatcccaaactcctggcctcaagcaatcctcccacctcagccccccaaagtactgggattacaggcctgagccaccatgcacagacttatccctctcttaaaaaaatttgttttcaacaaattcatatgagtaagattaagaagaaatggtacaaccagacataagctgaaaagcaaaagtctcctttcctactttgtttattttgcttcccctttcagaggaaactacatttgatcattaaaccaatacatcatttatattcattttttcaaaatatattaggttggtgcaacagtgattgaagttttgtcattgaaagtaatggcaaaaaccacacttttgcacctacctaatataaaacttcatttttgttttgtctttcatattgatgaaccatcatttgtttatttttttggatattggattgccttcattgttttcactattataaatacccctattacacatacaaaatcaaaataccatttttgccttggctttttaagaaaataaacgttgattttaaaaacaatttcagatatacagaaaaattgtgaagatactacagtgaattctcatttccctctaccatgttccccctattatgaacatcttatattagtgtggtagatttgttacaataagtgagtaaatatgaatactaattattttttattgatatctgatattatttggctctgtgtccccactaacatctcaccttgaattgtaataatccccacatatcatgggagggacccagtgggagataatttaaccatgggggtgggtttttcccctgctattctagtgatagtgaataagtctcatgagatctgatggttttataaaggggagttcccctgcacatgctctcttgcctgccaccgtgtaagacatgactttgttccccctttgccttctgccatgattgtgaggcctccagagccatgtggaactgtgagtctattagacctctttcctttataaattacccagtcttaggtaagtctttaatggcagcatgagaaaggactaatacaatatcaatagatattgatatcaattatttttatcataatttattcagattttcttagttttcacctttgtcttccaggagcccatcctggataccacactacatttattcattatggctccttaggttccacttagctgcaatgttttctcagacttcctttgttttggacagccttgtcaactttgagtaatactagcagggatactgatgttttcctaagtaccagactggcgttctaggtttagtaaggaagttcacagaggtaaagtgctatgcatgatatcaagtatacatattatcaacatgactttataccattgatgttgaccttgatcactgggctgaggtagtgttgtcagattactccgcctgaacatcattgacttttcccctttccattctgtactgtttgggaggagctcattatacacagttcacacttaaggagtcaggaattactgtccacccactggagggtgaaatatctacataaattaattgaatttttttttcttgagatgaagtcttactctgtgggccatgctggagtgcagtagcacgatctcagctcactacaacctctgcctcccaggttcaagtgattctcctgcctcagtctcttgagtagctgggattacaagcacatgccaccacgcccagcaaatttttgtatttttagtagagacagggtgtcaccatattggcaaggctggtctctaactcctgacctcaagtgatcctcccacctcagcctcccaaagtgctgggattacaggcgtgagccaccatgcctggatggaattcttttgtatggcagatctatttcttctatcccatttatttatttattaattcatttatttacatcaatataggcttatggatattcattttatactttgggttaccatccaatatgacttcactttgttgcttaaattgttccagctttggccactgacttctgtgcccctctgacgtttcccatcagtgtgggatttttttttttaagcacttccttactttctggaacgacatgattctccaggcttatcttgcatattttctgcttcaacattaggcaaccagttcttcaaggagctatgactcttttaattggggaacagaacaaaagccaagacctgagtgctaagtgtgattgttactattggggtgcccttgcttctagagcttctcagctgataaagtaaagaaatttatgtgtgtatactaacttgtgcctgcgcacctatctataaatatttctatatgtaaacttctgtgtctacattaagctaaacatgagtacattttggtgtttccaagtctaatatattaccacctggttagtctagcctattccccttgtttttttctgtaaaatcctacaccaaagtgagaaacatggcttctaccttcctctatccattcacataattattaaattctattgtatgcttgtagctgaacaaaatttttaacccatattgctgtaggaaagacactttatcaactagagagtttgagtttatgtgcagttcctcttccttttagacttacagactccactcatttccaaaattactgttaaccacttttaccttcagtgaggttgtagtgtacatttgtgatatagttatattcttttggaacagcctgcattccatcctgtgataaatatgtattgcaaactctaaagaaacctttttaaaatgactaaaaagaagattaaagatgcagtgatgcgggaaatcagtaaggatataaaatcagtaatttgacctgaacagcactatcaatcaatttgttctaattgacatgtatagactattccatccaacaacagcagtatacacattctgctcaacctcacctggaacattcatcaagtagaccatattctgggccataacatttatcttaacaaattcaaaagcgtggcaatcactttgaggaacttgtccagagggtataaggaaaggacaaacaaatgaaatatagaaatgatagaaaaagtgaaataaagagaagacattgtaatgttaatgtccataaaatagaaatacaagaagcattaaaaaataaataaatcaaggatagaaaatatttgaagaatattgtattcaaatatatcttataatttttgaaattataaaagcattaagaacccaaatttgagggtttcataaatggttaacaaaataaagaaaataatcctttacctagctacattattgcaaattttaggacataaaaggcaaagagaacaaaacaaaacattcaaggagggaaaaagaaacaagtattcaattgttatatttctcaccagttatggtggatacatgaagataatacgttactaaagaaaaagtgctttaaacctgggaatttatattttattaaaatataaaatattatttaaatgtgaaaatgaaacaaatttatttttagtttgaccacttaagatgtgctttgaaaataccattgaagatgggatatccataaaatggaatattattcagcaataaaaactcatgagttatcaagccacaagaaacatggaagaaccttaaatatacattcctaagtggcagaagccagtctgaaaaggctgtatgattgcagccccacgaccttctgggaaagggaagaccatggagacaataaaaaagatcagtggttgtcaaggattcagggactggttgaggatggagagggcagtggatggggagggaaatgggtagaacacagggcatattgagggcagtgaaactattttgtatgagactgttatggtggatacattgcatcatgcatttgtgaaaactcataaaagtgcacaacaccgagagtgaaatctaatgtaaactatgacctttaattagtaataatgtatcagtgttggttcagcacttgtcacaagtgcaccacactaatgcaagatgtgaataatagggaaaaactcgggagggtgggggctgggggaaggtgtagaaggaatacatgagaactctgtgcttttggttcaacttttctataaatctaatactgtttaaaaaattaaagtctgttgattaaaaaaaattacaccccagaaagaaaatatatccaggagaacccaggaaaatatgggaagtatggatgagaaaactatcaaagctatcagtaaggtatattacttataaataaacaagaaacaaaagagaaaaagcatacacaaaacaatccagactaacaattctcaaagacagaaatgtggtgtggtgggaaaaatgggatggagagtgtgaacaaagtcatgatgagacctcacagaggcaaaaatgtactaggatacttgtcttgggggcaatataaaatcatgtatataatttaagggtaattaatacaagtgttcatttaatacagtgggaataactaaggaaaaataggatttgagaatataattctcaaaccagaagaagaaaatttggtatgaccaatgaaaggaagaaaagaaaagaaggaaaaaaagaaaggaagaaaacatatagagaaggaatagaaagggaaagaggaagaaataaaggaaaaagggaagggaggaagaaagaagggagggaggatggaagagaggaaggaaggagggagggagagagggaaagccaaaacaggcgaggaatgatgagaaggatgggtagctgttctgtggattgtgtgagttaaggggaaggaagtggtgggacttaacatcagctccatatgctacagagtcaagtatcctcacatattcttacattttccctgaagttatatattgagagccagtggaagacatcgtagaaattccctggtctattttgtgaatgtgtcttgtagtacatagataattacatgtgagccattcctataaaaaggtttagattggtcaaggatgaaagaaaaagagacttgcaggtggaaaacaaaaagggcaataaattaaatctttcaaaataataattgctgaaaaatagtcatcttaagaacctcatataactactagtttaaaatattgccatccagttattgaaaaaagcaatttttcacatcaagaatttttatttatcttaaaatatttcagaggcaattggtgttatgctttagacacttgactgacagtaaaagtttactataataattcaaatgcctcttcaaagtggatgaacagaaacaaaacgttcagcgaggtgagtgttaaattattattatttagtgggaaaatgacctgaactattttctttggttgctgttacataatccataatctgatatcagttccattttgttgtttgtatttgtgcttgaactttcaatacaatagaggtcactaatggaagcctaaaaaagaatttttatttgacttttggttcattagaagtttctttgttctagttattttccttagcagagtgaatttctctcactttctcactatttgtccaatttactacctaagcctggatgtttgtcttttcatactctggaaacatggacaaagacaaaacatagggagtttcgaggcattattcaataactacctagagaataatggctctattttatatgatctaacttggtcacttgaatgggtcatatttctccaatattcacagaaccacctaagttgtttttggttgtgtggacatagatcagattgcctttgaatcatgatttgtagatgtaaacactatttattagttgtaaaaactttatattatctttaacagcctggccaaaaggtcattattgtttaggccttctgccttccagaaagagtatgactaaaacagatgtattgggcagaatttccagaaataccccaccacccccaatttcacagggctaatatccagaatctgtgaatgtgatgtcttttcattcccatgattgtcttatgtgatatgacgtagttgaccctgaaagggtagggtattcctggcagacctaatctaatcacagaagctgttcaaagcagagaaatttctcgtgctagtgacagaagacgaaagcatcagggaaagtcagaggaattcaaagtgtataaaggacttgagctgttgctggtttgaatacagaggagccacatgagaaggaaggtggttagccatgggttgctgagagagagattcacagctgagcatcagcaaaggaacctggagctcagacctagagccacaaagaactggattctgccaacaacctgaatgatcttgaaagtggtttcttcccccacattctccagattagagcccagtaagccatcaccttgactttgaccttgtgataacttgaccaaacctagctaagctggccaggacttctgacccacagaactgtgaaataatacatgggtgttgttttaagccattgagctctggtaatcagtaatatagaggcagacaataaatatagcatctaaaaccagtagctgtttattttgagatgtcaaagaggatcccattctggtgtttgatatttcagagtgccaggccatttttcctcacatcccactgacattcctcttgttttgatttaaatgaatagtctcccttagatgtcccagacaggattataagtctctttccttaaaagtttcagttgttaagatatgtagcataaaattgtatactataatggatcttgtaaatctaaccatttgctaaggtaacacaggttgtaggaagcaaatctggtactagaagccaagatgaaggattttcaacctagtgacctttctactcaaaagccatactggctctgaccttcatattttaattgatcaggcaaataatctcaaatcctccaactttgtttgattatttggctaattctgctcagaatcctctctaaatatctactggaggcagggacattaactgaatttgaaaagcaatattatggtaagactctctctaataataccataaaataccatagcaaggttgtttttaacagataattaaatgaagtccaaaggaaataactagcttgcccaaggttactctttgcaattgagaaaactgaggcttgaataggtgtaattattcattcaaatgtcctcggccagttcatggcagagatagaaagtcgatccacatctcttgatttccaattctttttttacactgagctatgtcaatatgtcaattctatagggtttgccctcagattagtttgagaaataaagtatattcacagcctctgtgttttcagtgtactaccagctgggatatctatgacttagttccaagctgtgatattctctgggactacaaatttttaagagccattttaaaattggctagaaggcaaatctagggtgcccataatgactgtacccagccctgctatgagtgactgcactgtgatttattccctactcagtgcccatcccccactccaaagccctacaggatttaggaaaaactgctggaagaaatgctacatcatgaaagcttaaaaaggctcagggaacaccacacttgaatcagtataggtgggactggtatatttcttttgctatttcattatccattttgcagttcttataaaaaatgagtctgttgatgtagtcttctgaagcattaagatatatgctatttctgcagtgaacaggctgcttagtgaagaagagtgtcggctcacttttgttctttcatatatttattagagtacgctttcccagagtgtcgattgcatgactttattgaagctagtttgaactcagactttcccccactgaatctgagatccactgaggcccagacaccaaggagctgttacacatgtataactattccattcacacctcttcaggagtttcaaacaagtttaattataagagaaacaaaagaaagcacttcttctttgccactgctaggaaaaaaaattgctttgcttggaaatcaattcattgtaagctttaatctgcctagttcggtttctcagaatgaatatttcaaatattaaatattttcttgagtagaatgtatagtacatattttatactaatatctatgtgtgtgttagacaattaagaagactggagtgttttccaaaaacttgaaaagttttcggtgactcgtaatacagaagtgacatttttatttgagaacaatttaccagattatgtcaagttcattattggtatgatactaattatccttaggataaattggaaaggggaaccctctgctagttttctgaagagctgcgtaagcctgatgaaatgtcttttctctttctgtgactcaaagctccagaaaaatctgcaaagttgaatatcacttgtgcctgctaatcttgtgtcatagttattttctatcactgtcataatgtcagagaagcactgggaaaatctgcacatcactcatctctccttcttcacccttatccaggtatatccacatatatccaaacatccagaaggtcacaggtgggatatttttgaagatgtactcacttcagcacaggtgaacctgttgatgacttccaggtctaaatatggtgaccttagtcacactggttatttttagggagcttcctctgactctcttataaactcaagatgataaatgcaatctacctgtaagattcttgagaaatttgtgttgtataatatgaccgtatatgatcccagtagttgtgtggaacttgataggaaccacagtaagtatcacctctccttgcttccatcattcccctactccaacagtttcatcttcctcttctgtttctagtgaataaaacatagtctgctgattttaaggtatattccattcccagttgtatacacaatggttaactttacattcgtgcaatcagtcagtcaacatttgagtgtgtactctatgtcagatgctgttttaggtgctaggggcccagcagtgaacaaaacaggccattgctgtgctggaagtaaaattctagttgggggagacataaaataaggaaataaataagtatataatataaggtaatatatacaaatgaaaaaaataaagcaggaaagagggtagggttttggggggaagaggatgttaaaaagttctaatggtctaggtatggctcattgacatagtgacctttgagcaaaatcgtgaaggtgaaggagctttactctttgaatcaggatgtcaggtcttagtttagactcttcagactagatcttagccattgtttatagatttgcttaaatgtctaattctttttcagctgattatgttggagtttattgttcctaatgaccaatatgctctaccaatgtcagaggcctgattgacttttgagggacaatgactgctccagtttatgcactttctctccccccagccctcccatccctcccatcctcctctgcctaccctccccaccccactcactttttggggttcctttgtcagctgtgtattatggcaaggatcgacattttcttgacattcattgtagagaaggtgatgtaatctctccttggagggtggtcacctgctgcttgcaggctgagctaaaagcagattctctcaatgacaggtatgactgcatttcctgggcaccttcagcaaacaaggctcttgcaacaatagcttgcgtcttattcttaattacttcataccccaaattaggtgggctaaatatctttttgttgtcacagaatggaaagcacatcataattagtgtaaaacaaatatcctcatagggtccaacatgcagtatcctaaaagaaaacgaagtaaacaatttatgtattttgtaatatacatggaatatgccattaggttgttttgcaaacccatgtaggtgatcctggtagattagatttacaatatatctttcctttcacttcattctctccatcctctatccattaatttttcttatatctagaaatagggcactaaagaaaactacagtatacagttcctgctttctctgaaatcaactattaacttcaggcaagtggaacacatacttggtacattacttttttttaaatccctgtattgcataatagaagagaatggtaatttttatcatgccattaatgtgattcctttctttattgcttaaagtgtcaatcagtcaaattgaaatgggttattactctgttatcttcttcattttaattatttggctctcccagcattacccttcattacctgttctccagaggatttgttttatctgaaaataatttactgcttaacatcgatgcatttttctgatatcgttaggtgggcctggtgttacatttagagagttaccgtcatcagagtaagaggaaatatatacagtgttttatcttgcagaacttaatgtaccaaatctgatgtcctataatgtttcagagggatgatacaaatcatttgcaactagaagctgaatattcagccttgtcacaagaattctcccttattcaattagattttttaggtgtttgctttaaaaagtaatatcagattagtaatggggaagcaatctttgaaatcattggtgggccaaaccatgataataagatacaaaagagaaatgaatggtgggaaatggcagacacattacacataaacattgttttgttatggcaaatctctacggcttctcaccacgatgtcagtacggaagtttgaaagaaaaatgtatgcgtctcccgtagagcccatgaacttgttttcttttgcatattatagaatctgcaggtatttttcaaatgaggaccacaaacattcaagtattaggttttcttacaatgacagccaatttagcaagcccaaggttttagagcatccttcaagaggctggttccatttgcacgttcatgttcaattcgcaaagcaacagcagcagcctttacgtatcccacgattaacacttcaacctccagcccattttgtaaggttaggcattcatcaaaatgtcagaatgattacagtacagatctaaaatcccttttgtcagacactggactttaatccgctcttttctgtagtcacgtcctgtcacttttgcagctgacaattattgtttttggtcaaaaaattgtaccttgcaatcaaaatggcttgttatccaaattgatctctgatgctacaaaatgttgtttgtggacaattctcctgagcaccactctccctctcctccagagtttacagttgaaatggaagcaatagaaagtcaggagaacagggtggggctgaggcatgcctggtcttttcactgctaggcttggatgcctaggaaatttacctggaggcttctgagtaactgaacctctaaaagatattaaacgagactttttcactattttattcatagtttgtgcttacttttaagtgagcttttgttttggaattaaaccctgacagtcagtggcagctagaatcgccacctgtcaaaagtaaggtttccagtaaacaaaatatttacatatatcaagtgtgagagagactggggaaaaatttaatgggcaaacagaaattcatagaaggctacaaagtctttcttgaccagtctcacttgtaggtcttaagcctaagatgccatattacaggtggatcagcttcgggaggaaagcaagagctttctattggaagcaagcaaacccctctttgtgagtttctttgcatttgaggttctataaattttggagctaaaacagttagtcccttatttttgtttcactgaagctgctgaatgctaataggttattgatgatggttttatttgccagccatgaaaaatgcttggacaacaggacatgcatgacagttaatctttgtagagagaagatgagcatcagtggctgaattaggtgcggagggttgcagatgatatttaggaacacagtgacatcaagggagagggtagcccatggaactgctggccataaatagttttaggcatactaaaaatatcaggagaggataggagagactatgtggaattgctttacaagaatggcagcttcttaagaattataatgagatcagaaggtacaatgcttttcagtacttagaggtttttttctagatggaaataagcaaaagtagagaattaccagggtttacattttgtctccatcatttatagctaattgaacatgggagaaaacgtagcttccttctaaggctcagcttcctcaactggaaaattggactaaaaaagaaccatacttcagagttgttaacaggattaaatgagataatatatgtcaagtgcctagctcaatgtttggcacctcagcacatgctccagaagtggtatcaattattattacataacagagataatatttggtgggctatgtgtatttgtgagtgagagggagaaagataactgttttttttacgcatttttgtgaatgtataactttctcccaactcagctgaagcatccaccatggagagaagtgcttcaggactgttaccagagaaattgaatgagaaagagatgaaaccattttttaacatccctaatgggaattttcagtgaatggctagacagtaggcataaaagccaaactgtcatcagggaagagtctttatacaatcaattatcaagatgcctgatggataaactagaccacaagtcctgcaggaggacttgctgggatggataaagtaaggaggcagtaggtcatcccttctgttctgaggaatgtgagaggaggacaggaaggtaggaagggcaggagagtcttcctttgcagactgtatccaagactggaaagaaattttaaattagtaaaatgagataccagcagcaggaagaggaaccactttgctgaccaaccctatacccactgggtaaagggagacagagcatcaaagtgatcccagtgatgtcatgtagataggcacagagaaaatgttggtgcttagctttcttgagcatgcctgctaataactggcatggatgggactgaaaagttcctgggttgcctaaataaaatacaaaggtgataactgctaagctgtgccagtatgaaatgaaggcaggccaaggcctccacagagaaccaccagccctgattaaactataagagactggccaccagattccagcatcagatcccaggtagggcgccatacaggagagaacctacaccagggactggcatgatctcagactcccatagatttggaaaccctgtctgtccactaccctatcatctcaaaactcactacattctgtacactcagtgcaatctttgaggggaacagagaaaagagagaaaatgggaaatgatgggattaagctaaactgacatgatagactaatcctaatcctattccctccctattcacctctgtcatcaccagtgccacacagaaggtgggagtcatgagaaagacacaatgcattgtacataaaaggaaaaaagctgtgtcttcaccaactcaaaataggaaaaattgtgaccctgtgatgacaactattacagctgtcataataaaatcaagatgatggctgtatttctcaggcctcacatcaccttttcttttacaaattatttgaaatttaaagtagttttttctaattctgtgaagaaagtcaatggtagcttgatggggatagcattgaatctataaattactttgggcagtatggccattttcatgatattgactcttcctatctatgagcatgggatgtttttccatttgtttgtgtcctcttttatttccttgagcagtggtttgtagttctccttgaagaggttcttcacgtcccttgtaagttgtattcctaggtattttattctctttgaagcaattatgaatgggagctcactcatgatttggctctgtttgtctcttattggtatataggaatgcttgtgatttttgcacattgattttgtatcctgagactttgctgaagctgcttatcagcttaaggagattttggtctgagatgaaaaattcatcctgctaaaaatgcttgatctggtaagccaagtgctagagagactagaggagccaaggaacacgtaggtagggtgagataacagaagaatacccaagctgaattgaaaggaggaggtgcaaagaagcttgtgcattggattaggaaaaaatatagactttgaactcacaaggacttgatttttttccaatttgtcgtctcactctctgcataacctctattatgagttgaattttgagccccccaacccccccccaaaaaagatgttgaagtcttaaatcccaacacctgtgaatgtgaccttaattggaaataaggtctttgcagatgatcatcttaagatgaggtgattaggatatatcctaataccacatgaatgtatctgtgtataaaggggaaatctgaacacagagacagacaagtccaaagaggatgaaggcagtgatcaaggtgatccagctacaagccaaggaacaccaaagattgccagcaaatcaacagaagccaggagagaggcctgaacagattctccctcacagcatgcaaaaggaacgaaccctgccaacaccttgatttcagacttctgacctctagagctgcaggatgataaatttctgttgtttaggccacccagtctgtagtgcttgtaatgtcagccccagcaaacaaatacagcctctcaactatgtctcatcggtaaattaattatttctccccaactcataccataaaatattttagacagcttgcacaagcccccaaacaaaaaaactgtgatgaaatggctaaatagtgtagtagccatggtgtatacgaatataaacagaaacatcgtaacaggaaaaaataagaaagtccattagatgcagttgagcttccagcttgtctcttagtttcctggaaaccaaagtgaaaggaggtacctgtttggtcagaaaagttttagtattacaaaggaaatagcattgtatttctttaggggaagcaaaaactttttcttagccctaaattctacaggcagtgctgaattgctcagtaaacaatgcacttaatgatatttccttggcaaatttggtgaattatccatacactggtgtgtatgtataacatggtagtgcaacccccaacctgaaggtgacacttgtgcgcacgtaaatctctatttcttagagatgtcaaatcaaatcttataaacataagaaagctacataagcatcacaaaaaattacaaacagctatgcctcattttcataagtgatgtcctgactctatctgatctagttttcatgtaagtcctttgccactttacatctatcctcaaaagcctaacggaatctggctggataccccaggtgcttcctcaacgtagaagttttctcttgtttgtttttttttttattctgagttattttgaatatatcagtcaattttaatctaaacttgcattatgttttcaaatacaatataagaatttaattaaaaacaatgcttcactgacagcagctctacaattctgtatttgacattgtagtacaacatgcaaaggcatgtattgaggtcagtctgaaatgaaacacttagcctctatattttttggaaaaacaaatccaaaatatgaaacattcagataggtaggcataacattcagatgtccagtgatggaggtcttgctttgaggggcaggctgtttcaggtataaataaatctctcaaagtctatttaggaaaaagatatatatatattcctgcaacttcttttgtttatttttattttttgtagagatggggtcttgctatgttgcccaggctgttctcgaattcctcacctcaagcaaccctcctgcctcagtctgccaaagtgctgggattacaggtctgtgccactgtgactggcctctgtaacttcttaattctgtctgcaggagccacatggaataatttatttagtgctttaaatatatatatatgtcactaagccattttaaggaagataatcagaaaataattatcaagctgttttgaccaatataattcagattctacttcaaaaaattacaagagattgcctgaattattttttatattaaaaacatagcaggcatatgttacacaatgagttttgttctgtctttcatttgttaatactttcttaggatgataatagaaaaaaaatttgagaatttatctttctctgtaccatcaaatctacagttttccgttgtttattctcagtcatttccattcccaatttaaatgttggatataataaccagccatattaaaggcccgattctatgaatagaaaacatgaaaaaaaatttaagcgaggatttgggagatggtggtaggtaactgaacttggtaataacaataaaatgatcccaatcagaggctgttgtgtgagcacagcctgtacaattaatagtgacacttcagcagcaaagccactccaagaatcataccatcgtttgccattttatatttctctccaagattttccagagaaatgccatcaaaagcacaaatactatttctaggattccaaactctaagaaacatattaattcagaagatgttaaagcatcaaaacagagaggaaaatgttggaatggttactatttatgactagcttctgctctctgcactgaagagcgtagctatttccttcattttacagttgacattcagaaaaagtacattaaaagtacccagaaaagccttatctctgcatatttttgcaatttggaaggacaaatagaaacaacattagaacttgatacatttagtcgtactctgtattgtagacttggagtggaaaaactgtattgtagactcggagtggaaaaaacacaaactgttttccctccgctctcacaccacaacaatcaacacagatgacttctgtgaccaaatgtgtagcagcttctccacaccaacaagcaataggcaatcaatcagttctgcagcagacaccagctgggtgtcatccagtttaattccaacacagcctggatggagatatcatcagatcccacagcttaaaggctcagtcccacaagaccaccgttcgcttcacatggcagtcacaggccctgggttgttttacatgcgcttctgaccaattgtctataaatcagggttcccatgaccccttccttgtgttcaatgaatttgctagagtagctaagagaactcagaaaaagacgtgactcagtttgttgtaaaggatattacagagtacagatgaaaagatacgtaaggaaagacatggggcaaaggatgtggagcttccctcctgggcacaccaccctccaggaacctccacacatttggctctccagcagttgtctgaacctagtcttttttgtgtttacagaggcttcattacgaaagcatgactgacaaaaccattggctattggtgagcaacttaactttcagcctgtctcccatccctggaggttgggggtgggactgaaaatcccaaccttctaattctgccttggtcatcttttggtgaccagtctccatcctaaagctacctaggggttgccagtcctcagtcaaatcattagaatatgaaaatatatcattttggaaaccctaagaattttaggattgtgtgccaggaaatgatgtcaaagaccagatacatgttttataatatcacagacacatgcataggttgtccaattttttctaagtgaagttaaaaagtatttcaaccccaattgtcctattcttcccttacatcattccttcctatacttctgtctaatgtaattaagaagaacatcgaggggaaacaacttttacttgatcagagaattaactgaactattcacttcccaagtgttcaactgaaaggtagattattttatctcatcattttaggattccttttcttaactgatttgttgtttatattgagtaaagtacaccaatattaagtagtacatcttgaaaatgttttacatatttaaaggtaatagctattgtattttctattaccctatattaattttgtctgtttatgagccaaaaatagattgttgcagaaaatatgtactctttgtatcttatttctttctctgagtaaaatgctttttattttcatctattttctttcacacagcagtactttatcttcttttatattccactaaatgtatgaaatgtatgttgttttttcactgtcatgttgatggagatatgggatgattccagccaagggctgttacaaataaagttgatataagcattcttgtatatgtcttttggtgggcatgcatactgatagaagtggaattgctataggtagatgtatatttagctttaattgatactgccagactcttgcaaaatagttgaactggtttatattctcactgacaatgtatgagagttccaggtgctccacatttaatattgtcagtatttttaattttagccattctagtggatgtaagttggtatcatattgtggtttttaatttgcatattcttgatgactaatgatgtttgggacattttcataggcctcaactgtttgaatatctttttagtgaagatgttctttcgattttttgccctttgaaaaattggtttgttcatctttcttattgatttggaggagttctgtttttttttgagacggagtctcactctataacccaggctggagtgcagtggtgcaatcttggctcactgcaagctccgtctcccaggttcacaccattctcctgcctcagcctcccgagtagctgggactacaggtgcctgccaccaggcccggctaattttttgtatttttagtacagacgggttttcaccatgttagccaggatggtctcaatctcctgacatcatgatctgctcgccttggcctcccaaacagcagggattacaggcatgagccagcgtgcctggcatggaggaattctttttatattctgcttacaggtactttgtaatgtatgtgtacaggtactgtgtaatatgtttttccactctatggcttgcctattcactttattaataatgtcttttgatgtacaaaatttctttatttggatagagcccaatttataatttccttttttgtgtttagttctttgtgtttgtttgttgaaactttgcttacctgccaaatcacaaagatatttttctactcttctagatggttggtgttttagttctgtgtttagatctgtatccacctggtatttacttttaattatgatatgcaacagggaccaaggtttttatttccacacagttgctatagtaccagataaccagtgctatagtaccatttattgaaaagactatccttttctcccattgatttgcagtggtgactatatcataaaccatatacctgtgggtctccaggtctatttctgtagtttattatgctcgtttggtctattctgttatctttactcattatcaaactcctccagcttcttgtacatgtttaagattgtctttgttattgtacattatttccatttttaaataaatttggaatcagattgacaacctcctccccatgcctaccccccaaaataaatcttctggggttttgaatgctattgcattaaaaccgtggatgagtttaagtttgttggaaattgacatcttaacaatatatcaagttctgcagcctattaacatggaataacatctgcatttagttagttcatttctttcactaatgtgttctattttggaatagatgtattatgcatgtttcattagatttattcctaagtatttgtttttgatgctatgctaaatggtatttttatctcactataattgttattattatatgaaattcatggatatgaaatacaattaatttttgtatgttggcctagccagcaaccttactaatttcccttattagtcattgtttctttagtattgtttatgaccatgttatgtgtaaataatgatagttttattttttcttgccaatttttgtacattttatttcctttccttgctttattgcaatgcttcattccagtataatgtggaatgggtgataatagacatccttgtcttgtccccaccatcagaaatgcactcagtctatggtatcatgttattaattctctagtgaaaccatagtttgtatttagtaaaacaacaatgtacatttggctatttcaagcttaattgaatttctttggcctctacatgattcttccttgctgaaaaggataatttataacaaatatttcattacttataaagcaaacacttgcatttcagaatacctttgtatttcactttcaactctagaaaatatttgttaggaaagtataatttatgaactgttataatgctttagtttctattcatttatttgggatttaccatgtattgctttaaattttaagcaatttttatatgaattgcttctactctacactatgaacacaaattcaaagatagcctgtatttgtattaaatttctttgaatctcttaaggcaactagcataatgccttgtctcaataaatatatgtttattgctttagagaaaacaagtccattactattttcaaagttgaaattgcgttatatgtttaagctgccatttaaacagcactacattttgccataattttgctatagttaacattccaagtatattcaaagttgatttttatttttttcagaaaaaatgccttagtctgtttggtattgctacaaaagaacacctgagactgagtaatttgtaagaaaagaagtttgtttagctcacagttctgcaggctgagaagttcaacggcatgaccctggcttctggcaggggcttttattctgcatcataacatgacagagaaggtcaaagaggatgcagacatgtgtgaagaggggaaagtttgctaggcatcttagccctgtaacaacccactctggtggaaactacccatttcctcaagaactaatttagtttagtcttgcgagagtgagaacttactaccagaagaacaacaccaagccattcatgaaggatctgccctcataacccaaacacctcccaataggccctacctccacactggggatcaaatttcaatatgagttttgatgagaacaaaccaaccatattcaaagcattgcaaaaagttgaaaaagctctactaatgtgtaaccagacatgtgaacatatataactttgagacatagcacaacacttaaaagccttcagaatcataaaaaatgtatctatcaatcttaatattttattaactcaaattatttttacctggctgcatggacatacaacatttaccctaaatttaaaatagaatgcaaattaatattcattggtattattttcattaattgcacaacatagtgaaaataatgttaacatttttttcctttccttcttccttcttctcttttgctttttttcttacctgtaaattaactgagttgccagatatccatagttatcaatggcaatttggaggctctcagaggcagaagtggttggtgtttttctatttattgttctagatttgggtctgagcacttttataagtgaaactttccaggtattttgttgttgttgttgttgttatatcaggtcttaaactatacctttataaattcttagtcatatatactaaagggcatttaatctcacgactgttatttatgggctttaagtcctctatgcaaagggtaaaattgtccctgtgaatttcagaggtagacattaggtaaagagagagttttttgcttgacttattgcttaagtcagagcgttctctgaatcttctaactcttcatttaattcacttgaaagtatttattaatcaatgtgcctaatacatagatgggactgcttccagtgagtctgtcagtcatgttaccagagcctttatttcttcctctatgccaagcttaaaaaatcagatgatttattttacatgagccacacatgcaaatagacctgtaatgctgaaattttgatacttaaaggtaaatctagtatcagagagctctattaagtggtctagagtatattcaaattacaagacatgcaacttattctaaaatctaatgcaatctactaacagcaagggagagggaactattcagagtaaataggacattgtttatctgaaattttattgacacattaattgacaactccattttatatgacgtatacaatcaactggacctgtttaatgttagtccttagataaaaaataattgtagctcaagacctcataattgtatatatttttttcactgtacctggtacaatcatttcatgtatgaaatgaatgagtccacaatacctcaatatttgaacattttgttttaattcacttaatcattgaaccacagagtctgtgctaaatgctattatctctataactcaacaataaggagatttaacagactcaccatttaatgtgcacgggagcacagatttcaaaatttgtttcagcacaaccttttggattatcatatatttgtaccataaaataaatcatctgattttttactctactgagacggatgcatatgcaacatatttatgtgcatatattcagtgttggaaattaattcataatcatgtatatcaagtgatttggatatttacctgcaccccatctcagggaatcattagagcttgcatttggaacatttaactgattttagttatgtaatgtaattttacacacattaccttacatttcccttcaaattccttctgaatcacactgttctgatttcctggaaacgcagttcaagaaatggccaagagtagaaggatgttataagacattgagtttcgaagttttcctttaaaatacaaaaagtgaaaattccacaaaagtggaatgaaacttgatttatagtgccgcaaagaaaaatcctggaatgtgcaggaaaggaagtgaatgaacttgggaacagctgcaagtaagtatgatgaacgactctgcattgggctagcagttcatctgttccacttgcagctgcaggccaaagcgtcaccaggttttctgcagaaactcaacttggcattttaatggctgaggtgaacccactggtggccagctgctgggactgaaaatcagaagcagctccagtccttccagattgtgaggggaaaggttaaggagagggaagtggtgccttgtcccagacagacgcccattggtcctgagatttcaaaaacaccaggagagagaatgcctggcagtggagaaaccaacactcagccttctctggaagaaagaaaaggcttgaggcaggattctcaagcttcatttaattacgatcaaatagggactggcagaagagcgtagctgcagatttgcagtaactctccctaaaagaacatgagctgtgagagagtgaccttgcagccagcactgatttgacattcacctgtttccctgcttgcattggaataccgctgggttagtttggatcccaaacatagaaaagtaactcctagcaggaggcagaagagagcacttaacattatgcggccaagaggttacactggctgctgcctcttatcaatgggtctttcaggtcctttttgggagcaatcctgggcttcattgccctgcctaaactgtagtttccaagcagtttctcaggcagttcctgttacattctgtgatcctgcctaatacagtaatttgattccagttgaaaacttccattacatacatgtcttgaatcgggagagttagagccttatactttgttcctctgcaaaactgtaagagcatcactgctgtattaaagggaagtgagtggaaagttgcaaagtgagcctttgagttcaagaaaacagatgaaaatgagcccaagccttggaactacagttctaagttttgagtggtggacagagtgggaaaccacgtagcatgcaaaggggagcggaagggcagaggaaggaagcaaggctacagtgtttggctgtgttctaatgtgctctggcatggagttatcgtgagtggaactaatattacataacactatgtatattttggaagatggctgggaaatagcctttggagccaatggagatttattaaataaaaattacctcaagcttgatttttcatctttaccaagcaccatagtaaattggcatctctgagactcctgcgggagccagaaagctggaatcaaaaattcagaaacatgaaatcaagaaagaactgaaaatctgaatggaaagccagtcacaaaagaataagaagtaaaatattctttaattatgtattatctcctacagatcaaaaggaactttccaccatttcattgaacctgtgagtgaaaatgatcccaaaagtatagagaaaataaagaacagtaagcaaattaattcagtttatatactgtcttttaacctgtttagaaagaatttgagaattgtttgatcctgattatataaaaaagatatatctgtatctatgtctacgtatatattaatacatacaaataaaatttctagaaggaagagtacacaattaacagtggttacttctgaagaatgggaatgggatgttggaggagacagatctgtcacttttcattttatatttctctggtgagatcaagggagcatcttactttgtaaatattaaaaatgctgaaatatgtaggttaaaatgtaattaatctacattcctatttttcagaattaatctgacttaccatctggtcatttttgcttgcttacattttttcttttgcaaaactcattatgttgttttgctaaaaacaattaaaacaatgcatcaaactagtaagaaaaaaaaagtctcaaaccacagagaaagactcacaattaccattagatacataaaattctatgatatatttctttgtacatttctggatcaaataatggcaagatggatgaactgatggatagatggatatatagacatgcatcgatgtaggcagacagtaagatcatagtataattgatattttaatttaacagaaggttaaaactgaaattttgcttttagaggaactattgacctcaaataaatgttttattttcaccttaagacgtatctttttctaaaagatccaaagttaacttgaaaaacatggaagtcgatttttttttttttttttattttaacctatcaagctcaattgactccctctcataaaagtggaggcacagtggctcacgcctgtaatccccgcactctgggaggccgaggcgggcggatcacgaggtcaggagatcgagaccatcctggctaacaaggtgaaatcccgtctctagtaaaaaatacaaaaaattagccgggcctggtggcgggcgcctgtagtcccagctactcggggctgaggcaggagaatggcgtgaacccgggaggcggagcttgcagtgagccgagatcccgccgctgcattacggcctggccgagagagcgagactccgtctaaaaaaaaaaaaaaaaaaagtgaagatattgccacaggtctcaggtcctctttccctgcttcactttctattagttttatcagttaggtttacatttactaagtttagagcatatacaatctttttttctttttttttttttgagacggagtctcgctctgtcgcccaggctggagtgcagcggcaggatctcgactcactgcaagctccgcctaccagattcacgccattctcctgcctcagaccccggagtagccgggactacaggcgcctgtgcaatctctatggtaaccacatttcccagttgactactaccggtaataaaatcaaatggattcagtgctcacaactcttcagtctttgggctactttccattcttgaatttttagctgaattcatctctttggctggattttgtggtaaagtagttttttgcttattttttcccccaagaagggcttacatgggtctttttctatgaattattttcctacttgacaatatttacttgttacttttttactttcatcatgccttgggcgcatataatactctcccttcacattttctttccttgaatttgtggagaattttccattttattcttgcagtcaactttactgaaaacaaatctgaaataaaattaatgttattctaccgtataggcgattggctttttagtcccaagatgcctaaaaataagttacccttaacacataatagcttaacttagttaggtctagaaattgagggtttgttttgtaccacattttctagaaagagtgctccttcaacctaaagatttacttagctttttttcaggaaatttcttggattagatcttagaataaatatttattttcatttgttaaattctctacttcaggaatatctgttaacattgtgttggatttttttgtttaaagtattcacttttctctaattgcttttatctccttatctgttcatcttccttcactataattatcttaatccccatttctctgtatcagtaacttaattttcaattgcatccattgtttttctaatttatgtattagtttcataaggctattgttttgagttctttcccccttatatcggtactctcctttatcatctaattctgttattctattattttgtctttgaattttgttttagtgaacttacattcctctattatattacattatattagaattagtagttttgagtaggttggttcatgagtttgtgagtagggtagtttcaagtagggttgagtagtatttttatgtttcttgtgataattttgccaaacaatgaatatttctttttagtataaagatgtctcatggaatatttaggacatgtatatgctaaaatttatttgttgcttatatgaatttcaaattgagctgggtgtctctatttttatattttaatttgctaaatctgtatgttttttataaatttccttccttccctccttccttccttccttccttccttccttccttccttccttccttccttccttccctccctccctccctccctaatctaggaggattttatagttgccatagcgttttcttttctttttgctcatgcttgtgtgtccctaagatgccaagttaggtgggatatattgtaggtggcctcttgactctcttctcaccatactgtttgttttctttacttaatatacagtctgagaactgaatttactttcatggattatctgtttgtctgtaatctatgggaatactgggtgatgaaggcagggatctagtcttagatactctgcagccttttctctgtctcctaagatattttttctgtgcaatgggagaggggtttttgtccaatcccctgggaaatactataaatgaataatttctcaaatttgctgtgtattcttgaatcttcactctcttcaaagagacttaagccactatttcattccgggtaggagcagctaaactaaactaacagaaaagctacaaattacagtggcttaaaaaacaaaggacatttttcttgcttgggtaaagtttcatttatttttccctctatttcattgccatgacttttagggagcagtgacttctaaattgtggttcttaatcaactagagtttatagtttgtctaacattttaaaaatataatcagtttctttactactatttttatattactaattcattaattttcacccaaatctttaagaacatggctctcatggttagggaaagaaaattgcgcaaaggacttgtgtccataccgtttttttggcctcactattcctgaatgtggtttctttcttctaatgaccaaactttaggggactaggactgtgcatctcagaattaaactggtatttctgatatgtatggtttatggttcaatggaaaaatataagaatttttcaaataattttctgattgtaaggatgaatgtgacctaatgttaaaatggcaggacagaaatattaaagaactgaatgatggcatcagctcagccatttagtatttgattttggacttagtttcctcatctgtataataagagctttgcctatgtatttttccaagaccatttcagggttttgcattattttatttcatttggaattaacattcaggtcatcttatagtagtgtactgaataactgaatgttaaatgtcttgctaaaataaatattgggttggtgaagttgaagttttggaataatagctaaaattaataactatagattttaattaatgatttcattcactaactttcaaaagttagacattcaaaaactgcaagaagaatattttttcaagattataaattgctagattcttcctgcagtggaaaggggaacatgagatatttgcagtattaaatagatactcactttcaattgatacatttaataacatcactaaccttcctattcatagtgaaatgagtgatgaaaaagttttttagtaaatattttttactggaacagaaataattttgtagcaggattcataatttgtgtatactgatttaagaatatcattacttcctgaaagtggcattcatctctatgggtagtcattttaacaaggtttttgttaaaaccttccccttcattaacacactttaggaaagtgtcttctaagtcattctatcaaagtctgttgctttcaaatttgattaaagaaaacaaagtattatttgcgtacctcatttttctctaacacatttttctttgcatttctcatattctggattatgtggggatcaaatatgatttaaatgttatgcacaattttgtggtttttcctactaatgaaattttgagttgcaaagttaacattctgccattgttaatatattcttattataaaaagacaaaatttcaacacatttcatttaaagatctcaattggcttttacttgcaattccagaatcgggcagccattagaaccaaaacagttctgaggagctcccaggctgcaatgtggtgcgaaatgttttatggacagaaaatggaaatgaggtgcagaaattggaggtgagattcagagatagctgattggttacagctcagcctttgccttgtttgaacatggtttgaacagttgattgactgaagctaggctgctgtgattggctgatactttactatttgttacaaaggcaaattcctaatttaagctttcaaattgtttaagtactaagttaggttttactttgttacttaggactcatatcgaggtttctaaagcccacatctgatacgatttaacattacctatgtgaagaattactaagcagaaacattttgaaagcctcatgacctgaatcgtattaaatacttaacaattgaatttgtctcaataataattatgtttaaaattatgaatgctggtttgtaaaaaaaaaagccacaaattttaaaattctgatataatctaatatctggtattcagctttgtattatcattttaaaatttaatgaacatctctggactctaaatatttttctttttaaagttatataaaacattctctttatattcattataactattaaactatttgcctacttatttatattgaaagtccttaatatttttacaataatttaataggtttcacaatcatcattacttattatagtttatactgtttgaataataaatatatgtctatactatgactcattgatacatttcaaaatacagtgcacataagaagatcttcattctctagatctgtcatactacatatgtgaaagttaacatttgtagtggcagtgaatcctaggggcagccttgcatgttaatgttatgtggttgatttgagaggatggggatctgtgtaatcatatgatgacaatttgggtttgggaatctcagaaatgccatcagtataggaatatggctattctgctcttcctaggctaagaataaacttgaagacaaagagtagattttggccagacactgatgctaaagtcaccccgatgctgtctttgcttctaaggtataaattaccttattttaagcaactttttcaccttttcaactctatccctttcctcagcctctttcatatgtgaaataaaatattcacttactactgaggatgattttttttaaacctattaaagaatactccatagctacagaggggaccatatcctttagagactccgttggggatgatcatatgcagaattattcttgtccctttgcctctgcttaatccccttcacaaagtctgtggctcaaacaaatgagagttggcagtactaaaggaataagttcccagcatacgtctgccatgctttagcatcatttcagattagaagcatggagcaaaggcagggagacgggtcaaacaaaatgctgagagcttccctccttttaaaaaacaaaattctagtcagggaattatttttaaataaaatgcaagcccccaagacataaataaacagccagcatataatactaacaactcaatgaaagatacttccccaggtcaactcatctggtaggatcagttattttgtgttactgcattgcccctctagcgggatcatagaagaccctaaaggctacaagaagaactgctttctggctctcaagtcatttcagtggttccctgatggcagctgtctctttggggaggtggtgccgtggtctgtttggggttaggccatcagcacaggccccttgtgctagcatcacattgtcataagctttctgctaccatggctaccatccatcaccaggctctgtctccatgggcagcagcctctgtgcccaggccaccccaggacctcaggcccatctctctttccaaaggtaggtaggtggccttttcccattctttagtttttgactttgtataactgaagcttctcctgggatgatgcaggcagctgctgcacagtcactccagacttactcttcactttgttgttaggcccctgcagctcgctgcacgtgactggtgccatctgccctccccgcacgggcagctgcccctcccacactgcctatttccccctttctgctttttgtagccacatgtctaaagatggcaggccagtctctgtggtctattttatgggactttcatttataactaggcagcaacccacattagttatttatcctgatgatctccctcctcttgccccccatgacaggccccagtgtgtgttgttcccctccctgtgtccatgtgttcttattgttcagctcctacttataagtgagaacgtgtggtatttggttttctgttcctgcattagtttgctgaggataatggcttccagctccatccatgtccctgcaaaggacatgatctcattccttttaatggctgcatagtattccatggtgtatatgtagcacattttctttatccagcctatcattgatgggcatttgggtggattccatgtctttgctatcgtgactagtgctgcagtgaacatacacgtgcatgtatctttgtaataaaatgatttatatcttggggggtagatacccagtaatgggattgctgggtcaaatgatatttctggttttagatatcacaacaccatcttccacaatgattgaactggtttacattcccaccaacattgtaaaagcattcctatttctccccaacttgccagcacctgtcatttcttgactttttaataatctccattctaattggcatgagatagtatctcattgtggttttgatttgcatttctctagtgatcagtgaggttgaacttttttcatatgtttgttagctgcatgaatgtcttcttttttttttcttttattttcttttttttgagacaaagtctcacagtgtcgttcaggctggagtggtgcagtggcaccatcttagctcaccgcaatctccaccttccagcttcaagcaattctcctgcctcagcctccgaagtagctgggattataggcacctgccactatgcccagatacttttttcgtatttttagtagagatggggtttcaccatattagctaggctgatctcaagctcctgacctcaggtgatccacctgcctcagcctcccaaagtgctggggttacaggcatgagctgcctcactcagccatgaatatcttcttttgagaagtgtctgttcatgtcctttgcccacaattgtattgttagtttttttcttgtgaatgtgtttaagttccttgtagattctgggtgttagacctttgtcagatggatagattgaaaaaattttctcccactgtgtaggttacctgttcactctaatgaaaatttcttttgctgtgcagaagctctttagtttaattagatctcatttttaaatttctgcttttgttgcaactgctgttggcaattttgtcatgaaatctttgtgcccatgtcctaaatggtattgcctagattttctagggtttttatagttttggggtttacatgtaagtctttattccatcttgagttaatttttgtgtaaggtgtaaggaaggggtacagtttcaattttctgcatatggctagccagttcttccagcaccatttattaagtagggtatcctttccccattgcttgtttttgtcaggtttgtcaaagatcagatggttgtggatgtgcagtctattttttttttttttttttttggagacagagtctcgctcttctgcccaggctggagtgcagtggcaggatcttggctcactgcaagctccacctcccgggtttacaccattctcctgcctcagcctcccgagtagatgggactacaggcacccaccaccatgcctggagatgtgcagtcttatttctgagttctctattctgttccattggtctatgtgtctgtttttgtactagtaccatgctgttttggttacagtagctttgtaatatagtttgaagttgtatagcatgatgcctccaggtttgctctttttgcttaggatagtcttggctgtatgagctcttttgtagttttatataaattttaaagtagtttcttctaattctatgaagaatgtcaattgtattttaatggaaatagtattgaatctataaattactttgggtgttatggctattttcacagtattgattcttcctatccatgattatggaatgtttttccatttgtttgtgtcctctcttttttccttgaacattggtttgtagttgtccttgaagaggtccttcacttcccttgttagctgtattcctagatattttattatctttatagcaattgtgaataggagttcatattcattatttggctctctgcttgttattgttggtgtatagaatgcttgtgacttttgcacattgattttgtgtcctgagactttgctgaagttgcctatcagcttaagaagcttttgagctgagacaatggagttttccagatatagggtcatgtcatctacagacaaagacaatttgacttcctttcttcctatttgaatatcacttatttctttctctttgcctgattgctctggccataactttgaatactatgttgaataggagtgttgagagatggcttccttgtcttgtgttggttttcaaggggaatgattccagcttttgcctattcagtatgatattggctgtaggtttgttataaatggctcttattattttgaggtatgttccttcaaaacctagtttattgagagtttttaacatgaagggatgttgaattttattgaaggccttttctgcttctattgaaataatcatgtggtttttgtcattggttctgtttatgtgatgaattatgtttattgatttgcatatgttgaacaagccttgcataccaacaattaagccaactttatcatggtggataagctttttgatgtactgctggattcagtttgccagtattttattgaaaatttttgcatcaatgttcatcagggttattggcctgaagttttctttttttgctgttatctcttccgggtttggtatcaggatgatgctgccctcatgaaatgagttagggaggagtccctctttcaattgtttggaatagtttcagaagaaagtgtatcagtttctctttgtacctctgatagaattcagctgtagaccagtctattcctgggcattatttggttggtaggctatttattactgcctcaatttcagagcttgttattggtctactcaagaattcaacttcttactggttcagtcttgggagggtgtatgtatccaggaatttatgcatttcttctagattttctagtttatttgcatagaggtgttaatagtatcctctgatggttgtttgtatttctgtggggtcagtggtgatatccctttatcatttttcattgtgtctatttgattttctctcttttcttctttattagtctagctagtggtctatttttaattttttttttcaaaaaaacagctcctggattcattgactatttttaaaggttttttgtgtctttattgccttcagttctgctctgagcttggttatttcttgtcttctgctagctttgtggtttgtttactcttggttctctagatcctttagttgtggtgttaggatgtcaatttgagatttttctagcttttcaatgtgggcatttagtggtatacatttccctcttaacactgctttagctgtgtcccagatattctgatatgttgtctgtttgttctcactcatttcaaagaacttcttgatttctgccttaatttcattatctacccaggtgtcattcaggagcaggttgttcaatttcgatgtagttgtgtggttttgagtgagtttcttgagttctgatttgattgtgctgtggtctaagagactgtttgttgttatttcagttcttttgcatttgctgaggagtgatttactttcaattatttgatcatttttagagtaagtgacatgtggcaccgagaagaatgtatattctgttgttttggggtggagagttctatcgatatctatcaagtccacttgatccagagctgagttcaagttctgattatctttgttaattttctgtcttgatgatctgcctaatattgacagtggggtgttaaagtatccccacaattattgtgtgggagtctaagtctctttgtatgtctcaacttgctatatgaatcagggtgctcctgtattgggtgcataaatatttaggatagttaacttttcttgttgtccccttcaccattatgtaatgcctgcccttatttgtcttttttgatctttgttggtttaaagtctgttttgtcagaaactaggatttcaacccctgcttttttctgttttccacttgcttggtaaattttcctccatccctttattttgggtctctgtgcagctttacatgtgagatgggtctctttaatacagcacactgatgaatcttgactctttatccagctttccattcttttagttggggcatttagcccatttacatttaagggtaatattgttatgtgtgaatttgatcctgtcattatgatgctagctggttatttgcagacttttttgatgaagttgcttcatagtgtcattagtctgtgtactccactgtgtttttatagtggctggtaacaggttttcacttccatatttagtgcttccttcaggaactcttgcaaggcaggcctggtggtgacaaactccctcagcatttgcttatctgaaaaggattttatttctcctttacttatgaagcttagtttgaccagatatgacattgtaggttggaaattcttttcttcaagaatgttgactattgccccaatctcttctggctttttgggtttctgctgagaggtctgctgttagtctgatgggcttttcttcataagtgacctggcctttttctctggctacctttgacgtatttttcttcattttgacattgaagaatctaatgactatgtgtcttggggttgttcttctcatggagtatcttactggggttctctggatttcctgagtttaaatgttgccctttcttgctaggttggggaagttctcctgggtgataccctaaagtatattttccaacttgattctgttcttcctgtttctttcaggtaccccagtcagcggtaggttcagtcttttaacataatcccatagttcacagaggttttgttcattccttttcattcttttttctctaatcttggctgcctgctttatttcggcaagatagtcttcaagctctgatatcctttttttccacttggtctattcagttattgatactcgtggttgcattgtgaagttctcatgttatgttttttcagctccatcaggtcatttctgtcctctctgagctggtgattttggttaacagctcctgtaatattttatcatggttcttagcttctttgcaatggattaggacatacttctttagctcagtgaagtttgttattacccatcttctgaagcctacttctgtcaattcatccatctcagcctcagctcagttcagggcccttactggagatatgttatgatcatttgaaggagaagaggcactctggctttttgagttttcaatgtttttgcattgattctttctcatctgcatgggtttatttacctttgatctttgaggctgctgacctttggatgaggtttttatgggttctttttaattgatattgttgtcctggctttctgtttgtttttcttttagcagtcaggaccttcttacatagggctgcagccatttgctgggggtccacttcagaccctattcacctggggtcctcccacacctggaggaatcaccagtggaggctgcacaacagcaaagatggcagagtgctccttttccccaagaggagcaccaacctgatgctggccagagtgctcctgtatgaggtgtatggagacccctgttgggaagtctcaccgactcaggaggaacaggatcagggacccgcttaaataaacagcctggcttcctcttggcggagagggtgtcctgcactcaggagaatccgcctcatcagggctgccctgactctccagagctggcaggcagaaaagagtaagattgttgattcacgataccgcagccgcccctcctcctatgggctcctttcagggagatcagagttctgttcataaacccctggctagggatgctgaaaatcccacagggaggccccacgcaggtaggaggaatgggtcaaggttctgcttaaagaagcagtctggccaggaactgtccacagctgctgtgctgcgctgtggggaattgctcccgttccaaactgcccagtctcgctggcacctgcagcagggaaaaacggctgactggagcagcagtggtggtagccaccccttcccccaccgaactcggtcttcttaggctgtctccaacctgctacactggctgacagggattccaaagtgggtttcagtttgtagggttccaagggagcagggccgctgagcaaggccgcttggctccctagcttcagcccccttcccacaggagtggacggatctcctgcctccttagttttcccagagctagagtatgcaaaaactcttatgtctcagtgtctgcccaagtggtcgcccacctgagcagccgctgtgagcctgcacagctctgtgttttggacccaaggcccttggtggtgtgggctcacaagggcgtgggttgcagagatccatgggaaaagcgtgcttttcagagctgggtagcacaatacctcaccagcttcctcggctcagagagggagcaccttttgccgcacgcaggctccgggtgggccctcgctccaccctgcttttcctcactgtctgtgggttgcgccaaccatctagtcagtcccaattagagaacctgggtacctcaattgaagatgcagaatttacttgctctttttgttcttggtggaagctgcagactggagctgtttctatttggccatcttggctcaaggttcagtttgagtttctgttgcagacactgcaagaaacagaaccgaatgaacaagagatatgaaagtatgtatcatggcaataactgtttctgtttatttcttattttgttttattttgctttctaatagaattggaggaaataggaagtatttaaaaagtgtttaaatttaccatcaattattcctgtatagttctctatttttaaaaatatgcccccaagttttgaaattctgattcaatacggactttgaaaggatgtgaaatttgggagcacgtattgctgttactaagactgggggctgtgagagggcttggtgttcccccaagcagtcaggcttgcagagagaatttgtgtcctgctacggtcttttgtaaaggaagctagccccacctgttgttcaaattcattttgcttgcgtgaaagaggaatgctgtccctggaaacctctgtccaagtgcctgttttttctgttgtgggcagcattgcaaaagtgatctgtatcctctcagaaaaaggaaaaaaaaatcacatctaaaaatgttcaatgtcattacattgaacactgaccggacaagtaagctggaactgtatggttatattcacaaattctgggatgtttgttttggctttgtgttataattgcagctacgaaactaaaagtgaacaaattgctttctcatttaatttctttttatcatgtctaagtctcagtatttttatttgtagaattgtgttaataataatccacaggcttactatgaggaataaatcagatactgtacataaaacaaataggatatttgttgacatatagtattcattcaccagatgcttaatctttccttcctcttgtctatgttagcctgcgattgttattctagtgttggtctcaaataacttaaactgtcattagaattttgctttaattcatagggccaatagaggaggaggcaatggaaaaatcactaggtatgtttgcttagtctctcagatgctatagcacacaactctcagagacttggaaaaatggaaacacagagatgttgttttgtgttttgtttttgagcacagttcttatagtaaatgtgaatgtttactattatttctagggtttatgataaaagatggaaaagagaggctatactgatgaacgttgtcaacatgggggcttgtcagaaattaaacaaacttttaagaaagtaattgaatttaacaaacattattgagtaccttatctggcccaggcatggatcttaacctcaactcctcatcaagggtagaaagtagactcagtcaatgctaggcatggtggttcatgcctgttattccagtgcttttggaagccaaggcaggacgatcgcttgagaccaggagttcgagaccagcctgggccataaaccaagaccttatcgctacaaaatagaaaaaaaaaaaattagccggaaatggtggtgtgtgaatgtagtccaagctacttggggctgaggtgggaggattgcttgaaccgaagagtttgagcctgcagtgagccattatcacaccactgcactccagcctaggtgacagagccagatcctgtctcaaaaccagaaaacaacaaaacaaacagacaaaaaacagactctttctagtcatgactttattccagtgcttaccacctggtccttgccctcagagttcacaataaagggattctggtctgggaagaaagcaactttaaagaatttctatcatcattctcataataccaataaactccaaaaaagagcctaaagattttcaaatgaccttccttagaagttctagatcctagttgattacctgagcaaccatttgcctatgtgtatttcaatttaaattgtcataaacagctactcaaggaattgattaatctgaattcaaaaataacttttatttagtgaaagtcaaagcacattattgtgttttaaaaagtcaaatgttgccaactcatgacttagttaagcctggaatatgaatgtgcaattgaagcagacattggctgtatgcacaatgcctgctgtttttcttgctgttagtcattatatgttatgtcctttgtcaggttggaaacaaaagattaatttcatttggtaggcttttaaaaatgtgtttgtctggttgtgtgtgtgtgtgtatatgtatatatgcatatatacacatatatacacgtatgtatgtatatatatgtatgtatatatgtatatatgtatatacacacacacatatataaatttagttctgaaatttaggcatatatatatatatatatatatatatgaaatttaggcgcatatatatatatatatatgcgcctaaatttcagcactaaatattaaagtttaggcttaaagtaccaagatatttttttcagagatggattattttagcactaaaattcttctgagccttcagtattgctgagctttatttaggaaatactcagtgatagaagatgaatgcaaaaaaaattgattaaaaaccggagccttaaaaattgaattcccttcttactgttgatgttcttatattattttggtatctacataaatgattatttgaaaaaatttctgacatctgatgatgtgtaacatgccaaattaatttccgaatgttaaaaatcattttacttatggataacttcattatgtagaagctgactatctaatttgtaattatttttatagaaaaatggcaagtagaagcttatcatgggtgaagttaacaacaaaaggctaaaatttatttgtctctcttcagtctttttctcttcagtcaaagacaacttacacacaacaagatttctccttcttaattactacatttattatggtatttaccctgttcaaaaagccttagtgaggttccagctttgaataagatagagtaaacatactgtgccctgtctgtcctactgaatacaactatcaaacctggacaaaacacatgaattatattttcaaggactctgaaaagtgaattgtagcagacggactgagaaagaccagacctgaaaataaaacaaaaccaggcgtgagtttaccatgtttatcctctggaggaacccagctttgacttgggaagctcagaagtagacatcaacacaggcaggaagagcttcacctggcagtgacggtgacagcagctgagggtccccaggtttctaaagctctcaggacgagaaagtaggtcccaagataaggagcctaaagggcttttttctttctgtgtattccttcttggcctccaacatgggtacagtcacaagagcatgtaacagagaagaaggaatagacctaccattttctagataaagaattggaaagaggatccacaggtaaccaaaaagtaccagggaaatggcagagaaggaaaacctcaggagaccaacctcataagtggtatttattagtgcctgggctcaaatccaaattgtacatgaatatgtctggtcctagatagggtaccgaagactttgaaagtgaattttggtatatcattgcccagattccagactggctattgtgtgacacaacatacaggatatatctgaatagtgctcagaagagtttgaaaatgcaaatgatattaaaataaagatgaaaaagagaaagctggtcagaacttgtggacataacccttctggatctgttgcctgattaaaaaatagttgatattctcgaatgaattaaaacaagatttagagactgagcatggtagctcattcttgtaatccaagcactttgggagggcaaggcaagagaattgcttgcggccaggagtttgagaccagcttggccaacagtgagaccaggttgctaggaaaaagaaaaaataaaaaaataaaaagctgggcatagtggcatgtgcctgtagtcacagctacttgggaggcttaggcaggaggattacttgagctgaggatgtcgaggctgcagtgagcacatcactgcactccagcttgggtgatagagcaagacctaaaaattaaaaaaaacaaaaaacaagacttagagtctcataatattcagtaagtctagcatataatgaaaaattgctcagcatatgaagaactaggaaaatttcaacttgcatgggaaatccaacctacattaacactgagatgacagatcttggaattacctgactgactctaaagcagctgttattaaaatgttccaatgagtaagggcaaatctctttatatgaattgaaaggaagaaggtctcaacaaagaaataaaagaaatacagacattttatggtaactttagaactaaaaaacacaataactcaattaaaaaaaaactcattggaaggctccatgaaagtgacagaggaagaattggtgaatttgaagatagattgatagaaattatttcatatgaacaacacagagaaacatgatttcaaaaaaaatgaacatagcttcaggaagctgaaggacaacataaaaaggtctgatatgtatggctttgaaaatccagaaaggtagaaagagtgcagtgtgtgtgtgtgtgtgtgtgtgtgtgtatgaacatgtacacaaacgtatataaacacccttatgtttgaagaaataatggctgaaacatcccaaattagccaaatcacataaacctacagattcaaggacctcagaaaactcaaaataaacacaaataaatccatgcccaaagacatcataatgaaactgctgaaaactaaagacaaagagaaaccttgaaaaaagcctgaaaaaaaatgatatgttccttgtggagaaaaatctatttaaataacttcaaatttcttgtcaaatttcacagaagctaaaaagaaatcaaccaacattttttaaatgctggaggaaaagaactgtcaagtaaaaatattatatccaacaaaaacctcctcaggaattaaggcaaaataaagacattctcagattaaaaacaaaataagacaaaacaaaacaaaacaaaaacccaaagataccctctaaaaagtttgctgaagaaattcttcacacacaagaaaataaactgaagagcaagtttcatgaaagaacagcagaaatggtaactatataaataaatatagtacatatcatccttttcttgagttatttaaaacacttgagagtcaaaagcaaaaatatgacattggctgatacagtttttatccagtatgcatatttaatttaaatatctactataatataaaaggacctatatgatggtagtaggattcctgcattctacttgaaaaagtaaagtattgattctaaatataacatgaaaattaagcatgtatatagcaatccctggagcaaccaccaaaatttttttttgtatacacaaagagatacagtaaaaaacctgatatacttcggtggaatgctaaaaataatccaataacacaaaataagacagaaaagctaaaacagaggaataaaaatcagaaacaaccagcagaaaacaaataatgaaatggtagacttaaatccaagcatatctatacttgcattaaatgtaaatggtctaaagggccaatttaaaggctaatgattaccagaataaataaagaaaaatgtatgatgcagcaatatgctatgtacaaaaaatcactttaaaataatgacaaaggtatgcccaaagtaaaaaggtgggaactataaaccatgcaaacattaaataaaacaatactcaggttgctatatcaatattagacaaaatagacttcaaagcaaggaaaatgactgggaataaagatgacattaaataataataaaaagaacaatttactaagaagacataacaaccttaactatgtctgtagcaaacagcatagcatcaaaatacgtgaagtagaaactaacaaaaatgaaaggacaaacagaaatattcacaattatactttgaagattcaacagtactttctagaaaattgacagaactagtaaacagaaaatatgccttgatatagaaaagctgaaggaaaaaaccaactgactgaatatagttgatgtttttctcactctactccaaaacaatagaataggcattcttttcaagtgcacgtggaataatattacatttatgaagatagacctcattctaaataataaaacaaatttatggcaagttcatggaattgaagtcacacaaaatatgttttttgtccatagtgtaattaaattagaaataaatgacagatgccaggggaaaaaaattccgaacagtttgaaattcaacaatacacttctaaatactctacagtcaaagaagaagtgtcaaaaaaaaataaattatttcaaactgcatagaaatgaaagtacagcatatcaaatttgtggaatgtctgcaaagcaatgtttggaataaaatttattatgtaaaatgctcatgttatgagaaaataagttctcaaatcaataatataagcagccaccttaagaacttacataaagaaaagcaaaaaaaaaaaaaaaaaacacacacacacaaagcaatcagaagtaaaaataataaagagcatacatcaataaaactgaaatcagaaaaacagtagaacaaattaatgaaaccaacaggtggttcttgaaagagattaatcaaattgatgaacctcttgcaagactgacaggaacaaagataaaacacacaatatcagaaatggaagaatcaccactactgacaccatagcattaaaagcataagaaggttatgtgtttatttatgtataatagcaataaataattagcaagcacaacttaattagtaatttcacttaaaatagctttcagaatgtgaagcacttagacataaacctaacaaaacatgtacaagatatgtatgctaaaaactacaaaccctcatgaaaaaatcatagatgacctaaatgaatggagacatgtaccttgttcatggattaaaacactaaacttgttaagcatgttaattctactgagttgatctatagatttaatgcaactccagtcaaaatcacagtagaatattttgtagatatagacaagctagtgctaaaattcatatgaaaaggcaaaggaactagaacagccaaagcacttcttgaaagaaatggagaaattatgtgctcaattttaagaattattaaaaagcttcagtaatcaagagtctggtatcagagacgagatcagtgggtcccatagatcaatgggacataaatagacctgcataaatatgccaactcatctttaataaagatgcaaaagcaacttactgcagaaagggtaatgttctaacaaatagtaatggaacaataggaaacaattggtatacagaagaaaatgcaacctaatcctcacatattatgcaaaaagaagctcaaaatggatcgtagatttaaatgtaaaacacaaaattataaaatgtttagaagaaaatcttcatgacctagagttagggagtgagtttgggcatatctaagaagaaaatatatgtatatatttgataatttaaattggactttatacaaatttaaaacttttgctctgtaaaagacactataagagagtgaaaagataagctatagacagaaataaaatcttttcaaatttcatattcttcaaggggtttgcattcaagatatatttgaaaactcttaaaaatcaatggcaaaaatacaaagaacacgatttaaaagtgggcaaaagtcttgaacagattgtcgaccaaagtagatatggggaaggtaatcaaacagaactatgtgcaacatcattagcttaacttagggaaatgcaactaaaatgataatgccatagcactagaatgataattataaaaagaaaacaaaacgaaagaccctttcactaccaactgctggtaaggatgtggagcaactagacttcttatacgttgattatagggatacaaaatggcaaagctgcttgaaaaatgggttggcaatttctcagaaaggtgaacaaatgcttatcatatgacccatacatgccattccttagtatttatgctagcaaactttaaatttatgttcacaaaaaaccatatgtgaatatttatagtagctttgttcatatttgtcaaaaattgacaatcatcaaaatgccattcaacaggtgaatagaaaaacaaactgtggtatctgactacttcttgtcaattaaaaggaatgaattattgatttgtgcaacaacttggatgaatttcaaaggcattatacagaatgaaagaagtcaacctcaaaaagtttacctaccatatcatatagaatttcaacaaggcagagttatggtggaacgaaatcagtgagtgccaggggttggggtgggggaaaagtgtgactacaaggagatagcatgggaggttttgggggaactgatggagctgttccacatcttgattctcatggtgattatataaatctatgcatgtgatataattcataaaactatgatttatatgactataaattaattttaaaaataaaactagaagaaaaaagtcttcccaatgcttgactattgcttttagattatcctctaaactccatagcaggcaatgaatggcttccattctctggctacactcattttcccaacgtatttttttgcccagcattgttgtgaatctgttctcagtgtctcactcactttagtttttctctattccctaaagatccgagttataatatacaacctcaccaatgctgattatttgagaccagcagcatatctggagctggttaactgacagatgtgattggttggaactttacctaattcacccaaggcacatttggttttcaaagacttgaaaagggatcaatgttctcatctgtgaggttttaagacttttgtaggcgaggatgaatttcattctactgacaacctgaacgttttttcatgatttcaatacccctataaaaagataaaggcagctgggaatacttactctagaagaaatatggttgaaaggagaatataaaccattcacataaatggtaaataagtatttgtcatcttaactaaggatacaaaaaaaaggaagtgtgcatcaattataccatgatggattaattgtgctgtatggaaaaatttcctattaaggaaatttgtttaccttcctgaaaagtgtggctgaggttggtcacagagttgttctctagatctctttaaggatagattcctttttattttttaattgacaaaataaattttatttacttactgtgtacaacattgatgttttcaaatatatatacattatgaaatgactaaattttatcaaattaacatatgtattacattagatagttaccatttttgtggtgagaacactttacatttactcttttttttttaagaatacaatgtatcattaatgatagtcaccatggtacaataaatatctgtaatttattcctcctatctaactgaaattatgtatcctttaaccgacatcttcctaacacctccaatcagttcaatccaccattctgttctctcctatgagatcagcttttttagattctgagtatgagtgagatcatgcaatatttgtctttctgtgcctggattatttcacttaatacaatgtcctccaggctcatccatcttaattgcaaatgagaggatttccttctttattacagttgaatagtattttattttgtatatgtaacacatttcctttatccattcatccactgatggacactgaggttaatgtcatatcttgactattgtgaatggtgctgcagtaaacacggtaaacacggaagtgtaaaatatctctttgaaatacttatttcatatatatgtatgtatatatatgtatacatacatgtacatatatattcatacatatatgtatgtatatacatatgtacatgtatgtatgtatgaatatacatatatgcatgtatacatatatatgtatgaatatatatacatgtacatgaatatgaatatatgtacatgcatatgtacacatatatacatacatatatatatatatatatatatatatatatatatatatagtggtgggattgctggatcatatggtagttctgtttttaattttctgagaaaccttcacgctgttttccataatggttacactaatttccattcccaccagcaatgcacaagagtcccctttcctccacatcctcactagcacttgttatgttttgtctttttggtaaaagccattctaataggtgtgaggtgatatcgcattgtgacgttaatttgcgtttatccagtgattagtgatgttgagcatttttcatatgcccgatggccacttgtatgtctttttttgagaagtgtctattcagatattttgcccgttttttaatcgggttgttttgttgctgttgagttgtttgagttccttatatattttggatatgaaccccttatcaaatgtatattttacaaatatgttttcccataggatagatttttaaccgtttgggatggtttaagggaggccaaatggaaagcctaaaaaaagagcattctgtggctccatggtggattctggcatacttttttcaggatgctcttttccaggtcaatatttaaagaacttgaagaccgcaaagcttctgctcttgagatgagaaggagcttctcctccactaatgatctgaatttaacactggatcacttaaagccaggttcatttgcaaaatatttgctcagctttgatgctataaaagcctctccaaagctaaggaaaccctgagaaatggattattcatgtgactctgcagagcttggtatcaggcattgcttgtatttaatctttccctaagcattaacattctaagcttatgaaaaatttgtgacgtatgctaaatatattccatccagttatgatcagagtccagtcacctgagtgtaagatttctgccctttcagtgagaattgagagccctggtgaaggcagatagaaaagcccagaaacacttgttgttttatttatttttcattgagcctctggctaatttttgataaggtgtcacagatttaatcagttttagtttaaatagaagattgagaaatactatcttcttttcattaccattagaaagaaaccttaaagcttaattttgactgcatgaaatgatatctaacagcaaatatttgtaattggtgtattccagatacttgtagtgtaggaaatacaatattgttttctttaaaaggaaattgggtgtgtataaaacatcagaggaaacaaatttaaggcaagattctgaatgacagttctgtattctacaaacctttgctaatgaaagggaagatgatgattttcaatgtaggtcatggcctgaagtggagaatttctgaaattgtcattgcagaccctccaatcagcctgatctgtctctgcaacactcctgatgagctctgagccttctcagtgctatgagtatttacatcaggcagaggtgggttgggatccaaagcttacccaccctaatatgagtaagatgattctattacattcatcctagagagaatatccttcatagaaatagaggaagaaaaagcttgcatttggttaggaatatagattatgaagagcctccttatcctgaaagctgagataatatctgtatcatatgtggtaacaaaaaataaggttatttgtataaagaagttagcatataggaaggtatatagtaaagtgcttcataatggcaggaaggaaagaaatattgaaggaaaaatttaaaagacattgcgtcagttggtatctgtttttggcaagtaaacaaacaaaatatattttctcttttctgccagtagataggttaggaagcagctggaaggtaacatcgtgtctgacttctaggatatcacaccttcaatgagttattgttttattgttccttgggagcttccactgaacgtggtgttctgtcacttctgaaactctggggatttcttttcatgatagaaaattgacaactagtatttttttaatcatagaaggtaagaattgtgcttattgaccaaacatgtgatcaaaagtggttagaaagtctttagcaggtgtaccataaatgcctgccaccttcccatttccacacctccacagacagcttcttgtgaataccccctccacacatacccaaccatacatagtgttctctctgctaagaagaaaactgtatacagaccacatgacctcacctcactttcattctcctccgtacccaaagctgagactatggtggccagtcatttgtaagctgtctaggcacctttgacatggcattgtttgaaaagataagaggttatctttggggaatttggtatgaaggaacaaagcaatgagcagtgaagatgaaagtttatgtgacagaggctgagatagccatcatggggaatgatttaagctgaaattgtgggaaagtagaaagtatgactatgaataagtgtaatgtataacataaagacagatgatttataacacagagaaaatattacagatcagaaaatgaaaaagccaaaggggagagataagagagtggaatcgatttctgcgtaggtagagagtttaatataaagtagaatatggaatccttccatgttctccctcataaaattcacagaaacctcacgacttaccaaagatgccaagaggagcaggagatgctcttgtgtttcacccaaatatttgtttctcattttttttaatgaatgtgtgtattttctagaatgaatataaaggaatgcctcattcgtttatgtatttaaaatacgtcttgactaccaataatgtataacaacctctgctagactcaatgctaggtccagtgcatgcacttggaatccagggacccaacttggaagggctcacagtcttatgttaggagacagataaggaagcatatttatggggcacatgtgagattttgttacatgcatagaatgtgtagtgattaagtcagggtatttgagatgtccactactttgactatctgtcatttctatgtgttacatgctgtgatactgataaagacagggtatgtaaatgtgggagctcaaaggagggacatctaactccaacagtttgccagttgtggggaagaaagggtaaggaagtttcctcaaataattacatctgagcagaattatggcatgccagcaacctcagccaggtgaagggcaaagagaaacatttgcatgagagcctccagggaggtagagaatgcagtgttcaggaactacaacaacaacaacaacaacaaatcaagtattcctgggccacaagatgtgagagggggaatgatgggagatttgctggagggcagggggattcaaataaaagaccagcacacatgagctggtttgtgacctactacatagttttgacttgatccttacaacatagtattttaagttaaagagagagaagttcatatttgcagcggggaggtggataagtggttgttgagacattaaaatagtagagtttactggacttggaagacttagcactggacttggtaacttagtaccttgatttctggcatctcagtgagttgaggccacatgacaagtaggaggaagagcagttattatcaagagaatgcaaatgactgaaatgttgagttggggtttctatgggatatactggtagatagcagagtcagtagtaagatacaaataggtctgagacacaggagagaatctcaaaagggatattaagcttccatctctgtaagagccatatggttgggtagttggtttgctttgtgctatacaactatttgaagttctttacattttctttcctcctgttttttttttttttttttttttgaaacaagatcttgctctgttacccaggctggagtccagtggtgtgatcatagctcactgcagcctcaaactcctaggctcaagcgatcctcccacctcagccaactgagtagctgggactacaggcatgtgccaccatgccccattaattttttatttgtattttttttaaagacaggggtctcacggtgctggccagactggtctcaaactcctggcctcaagttatcctcccacctctacgttttcaaatctaaaaaaatagtttaggacgtattcaccttagagatttaagagtttatattttagcaagctgtaaagtccagaaatcaaattgtgagtgggcaaacaaaatcaaagcaagtttcatctcatttagaaatgtggaagaatgagaacccttagtttaccttgcttttgtgcatgcagagtgctagctgtaatgggttagcacaaaaagacaaaatcctaaatcacagtcactttgccataatttttaatagttatgttctctcatagttctatggatgacatgctcattatagacagtctgaaactgaggagaaccagggttcttcctacatgtttatgttgaatgtggagaaggtgaggttactgcttctgctgcccttttcagctcaacatttgatctggccaatgtggttagctatactgtgtctcctaccaccacacatactcagaaaactgtggtagtaaacatagaatgaacttccttaaaagtagaaaaccattcattggctaaggtacataagaataagaatgaatgatgaaaacattggtagaaatgctgatggaagaactgattgatgcagatctattttggagaccccttaactgccaggggacatgaattgcctggctggttgaattgactctagaaatgatgctctgtggccgctaagtctccatatttgaccaaaaggtgtgtgagggctgtgtccatttcatcacttgccatgagtcctcagggctagtcagaataccaggccgatacacgcttcacaagcatgtattgaatgagtgaatgagaaaatgaatacaataatattttcactagtagccatggattgaggataaaattaataagaagagcccccaggaagtccggattgagctttatgctctgggacactcttctgctcagctttgtggaataatttgcagcactagaaatggacttaacaaccaggatgagggggtcatgttttggggatcaaacctcttttcatcatgaaagctactgggtggcctctgacatgatgtgtttagttatcaaacatgtcagctaataccatggagagaacacatgtattaaaagtgacagacataacaagggtcaaagattaaaggtgaattgcaaagggctttttactgcatctctgttgttataacagtttctagagtaggttgaatacatgagcaaaaagaatgatgaggagtcatggtgagcagaagctctcttctcaggcaaagcaggaatttttttccccacattgagctaaatattctttaaatgctataaatgttactacatatctgtgctgtttgtgggacagcacaaacatatttgaaacattcagcagttctttctcattaacttccatttttctaattttcattggttatattttcctgattacagaagtagtattggctcattatcaaaaataaatgaatgaaaaaatatagacagttaaaatgtgatataatgtaatggcctaaatatgacattgttaactgtacattcctgcagttacaattgaagatggcattttatcccttaatcagatacaaagaactgttagaaaacttcctttttgcccaccactgcattgtatactgtggtatatatggaaattcccaatacagacatggaaatgataaataaacacaaggggaactctcacggcataactctgtgtctagcaggctaagataataccatgttgtgcagtggtggtaattagagcacatcacgtgactctgagtttttgagggcagtggtcaatatctttatctttgtatccccaagggtgttggctaaaatgttcagttagcactttgaatgagggaatgcttattgagtaaaaagtcaattacatgtgacaataaatgcagtaagaattagtcaagagaaagacaagtgtggcctgcagtcaccaacagaagctttaagctccaaggatacccaaatgcgtatgttaatcatgtgttattgttaaagcatttagatgatgatgtttggaagttgtgtgcaaaaccaggaaaaatttgaccaagttttggaagttcctttctgtttgatttatctgctgttatggtgttagggctattgctgttttatagatcagttctacactgtagtaattaactgggtaatgaagacaaaaagtatttagaaacactctgacatatcaagaaattagtgtcaccaacccagaggcttctctgtctcttcagcataatcttccatctcaggtatacctaaacttgggtgtttactgcctcaaaagcaagcatttcccttgaaaagcagatttctttctttctttttttttttttttttttttttttttttttttttttttttttgagatgagtctcgctctgtcacccaggctggagtgcagtggcacaatcttggctcactgcaacctctgcctcccgggttcaagcaattctcctgcctcaacctcccgagttgctgggtctacaggcatatgccaccatgcctggctaatttttttgtatttttagtagagacggggtttcagtatattggccaggctggtctcaaactcctgacctcaggtgatccgcctgccttggcctcccaaagtgctgggattacagagagaagctccagcttttgcactagctgaatgttgttatacttcctcaaacatttgaggataaagacataatatgtgatagttttaggtgactttttgtgtgtaacatttgagctctgaggataataatatatctttctatataacacatttcaatatctatttaatgtgccagttgcaagaattttctgattgacattgatcattttcattcagaattaagtcatttccttctgggaattaatataatagatttattatatgcttatgggccttgtctaagctctcttctccacactgtttcttcaaatgtaattccattgaaaatctagctgctgttttagagattacagtaaggcaaagcatttctcagaagacaaatatagaacctaaagttactataatgacatttggcaaattatataatctgagttcattttttttctcttctctccctcctcccttgtcacaaagcctataggaaggtatactacatattttgacacttttttttttttttgctttcaatagctgtgttcttactcaccactttaaaataacgtctttcttatatcttttaactcagaggtatactcagagactggaagacttgaacggggactggctacccagatagagcccccttggtggtgttttccttggtgatatgatactgggccgtattccctcaggattgcagggtgagaactgtgtctttgctagcagactaggtaggagaggatccattcctcagaatcaggttcatgttaacatagttcacatattgtattaaatacaaaccagaatgccaagttttttatttacaatgagcaatatagctgttaaataggctatggcactcaagtcaacaacaattcacagactcctctccccatagagaagcaacatggggatccaaattgtaatcagaatgccaagttatcaatttataatgagaaatgcatctgtctgacgagaatgttgagttggcctgataaattcattgtctccctgtagattagtgacaggggatgccaaattttcggaaagttgcgagagaatatggctttaaaacaatgggaaggagttgatcttaatttctgtcttccaattaagatggttttaacattcccacctctacctggctggccttgccgagaaaacaatactgctttagtcaaacaatactgctttagtcgctgtgaccagtgtgggcaataaaatgtttattttctgcctttcctttttctttgcttttctcaaccaactacctctctccaaaaatgtgtatgacataattgattgggcttttgtctgtcatagtattgattcatcgagcctcaatcatatttcagccttccagccctagaattactcccatattattttttactggtgtctgggctatgttcatatgtgccaatcaaacatgtatagtttactgacctaacctcacatttgtttaatcatatcctttatttttaaattctgtaaatcaactcactgcagtccttggcactgaaaatacctctatttcttcactacatttcctgaagtggcaaaaatgccaagattatatgagacccagggggaaatatagtgttctctgcccctagtgtttaatgcaaattgaaactaaaataaggcttgctttgaaaaagtacaaaaataaattttaaaaaatgctaaaagctggattcttctcttttggagatggcaaagagatagtaaagttgataaagagatgatttgggaaatgcaggtactttttagcattagtgagtagactcatttctaacatctcctggaagtatttgtgaattggctccagaatcttttgctatcacctaccctacaattaactagggatatgcaatcaccaaatacagtttctgggacaccttcaaagatgtcagcttcttcaccataaagatggcaaaaagtagaataattacattctatctttgacctttgatgagaaatgatcagtttctttttctaatccaatatggcaagcacttctaattcgtgtgaatagatctctttatagacatagtgtgtttatatttaaatactaagataatctggaattctgaagctacaactgtataatgacattatacttggtcagctattgcttttcttttcccatttatttattttgcattgagtcctacactggtgaaaggcctggtgcgttgcattgagttctgcatgtttgaacttcacaaaggttcaaaggtgtgcacatggcctggaacgataaacatttgtcctaaagtcattcttcagcttctgacatagcttgtgatttaattgccacctcattaatatgggccactgggtgtgaatttgtcaaaacaagatacatcaggagagctgagtgaaatgtttcatgttcagaggtttttaccactcctgttccccactgcccatgttttgtaaacttttaacttcaagagactggtttaataaacatgccctgtcttctaggtcattgggttaaggatcatttcagtctttttgaacttttcacttttcctgtgtaagtataagctaagtacttattgggttctaaagctaaaagcctatgaagataaagggccttattgaaatagtgaagtgagcaaaatatctttatggttcctgaccttgtcctcctgggctttgtccttcttttaatgaatgacaccttaccctcaggttcccagtatttacacctttgtagtgtttttgcaattcagaaaaatgtatttgatagatgagtagggtgactgtcgtttacaataatctattttctatctcaaaatagctaaaagagaatagtttgaatgtttctagcattaacaaaagacaaacatttaaggtgatacatattccaattataccgacttgatctttacaagttatacaaatgtattaattcaccacgtgtagcccaaaaatatgtacaactattaagtatcaatttaaatttttttaaaaggacacagtgaaggaccatacttaaacttgattatttaattgctcatcatgaaattttatagggaaagaagaagaaaatcttcaataactcaaactcataagtaaagggacatacatggctgtatataaaggctatttataaagccctctatataaaagttatacatagcctataaaataaataaggatctgactttatattggtacctggcacaacacatgcattgcacacaggaaccactccataattacaattaaaattattatacacacaaatacatatttacttcttatcaaggtatcacatgttaatgctcacatgaagcagtatcaaaataccgccaatgagttgtagaagtctcttgctctattttcctcagtggcattctcactccctagtgaagtgtttttaattatttttatttttttatttttttactggctattttagactttctggtagagcactcaataatttctggatctgtcagagttaggcaatccactctgcaattggcaagatggggattttgctcatttatacttgactctccttcttctattaatcttctccttctatttatataactgtaacatagctgcaagctttaagtaaaacacgtaaagtcattttcttgttctgatgacttgcaatattttctctttattccccacgagatgaaatgaggatcttggtcccatacgctttccccaacttcttctcactcatttcaggccctacttctgtcaatcactctttctgtgtttagattgttgatatttgcacgttctgctaaaaatacaatcatctttgcccaaaggttaactttaaaagtagaacaataaacagtattaacattattatggccacataaaaatcatttaatgttaggtaaaaagtatgttaggattacatttttttaagagaccaatgtcatgacctctaactcactgaaaagaaaagattcctagcatttgagttcaaataaatgtttttttccttatatttagtcaattgcttaaaattaagctgcatttcttttatgtattctattttcctgcatcatatcttcatatatatttttttactctctatcatattatctagtctatttggtctgctttcccccactccaaatatatcccccttctagagtcgtctttctccctactccacactggacttacaactcctagacatcgtgctgcatcgctaatgtcctaagtttggtgttattggtgctatcaatcttcttggttagatctgatattttggtagcttcctattttttgaattatcctcttgttttattataatacatcctaaagtaacttcctaagagaaagcacacaggaggtaaatgttctgtttcttgcatactctcatatttgtgtgaccctttggccgacgatagaattctaggttgaaaagagttttcctttcgaaatttgaaagctctgctccattgttgttgatgagaagtcaagtactagttttattcctcctgtttccctttaaaaacttttaggagcatctcattattttaggtatttacatgttttcgatgacatacttgagaatcctttttgcacttattacaatatacactcaaggaaacttcttggtttatagattaatgtcttccattgagctatgggaaactttatttctatcttttctttaatatgttctcgcctccattttctctcttctctttctctgacttttaatatctggatgttagatcttccagacttatcctttctcatgacttctgtctttatactttagtcaaattagtgagagtccctttactgtgtttactccctctacttttctattttgtttattccaacaactgtgtttttagtttctaagtagtctttcttgctctctattttaattgtccttaccttctgtttttattttttggttataatagtttctccaatttgtgtaagtttattagagtatcttttgtctttgttcatttatttcttacactattcctgttttcatcttgcctgtcttagtctttatccataatattgccagatctcctaatatatttattattcttgctggtctatttgtatttaagggaaacaaaaatggcagactgcttttttttttatctaatagaactatttacacttaaaatctttatccttagtgagaactgtgggaatagaggaaacagagggaggggcaggtgatccaatatattaaagaggtgaaatttggcatcaatgagcctccaccataaaagaatgtgaaaattgctattcccagatgccaacatctaactaaagccttgcttttctactgggaattagttcaatttttttagagaagaacaaacaataatttttgttttgctttgttttggtttttggtttggggggttgcatgattattattttcttggatgattattattatttgcttgtaattgttcctgctgtttgtttcccaatatctcaaacggagatatttggctgcacaggagaacaacatatgtagctgtttcatacatggagcttacattgggttttgttttcagtcatatcttttatttctacccttggactccctgaagtttttgttattctttttatttctgccaaatctcccaccaatttcgtagtcaccttatagcatattttagactctggttttctgcctgttacgttttaaaatggagcagtaaacacaattatgaccacataactaagttaaaattgagtcaaaaagtgtgctaagattaggttttagatttttttttactttcagggaccaatgttgtgaacttcccatcacctatcttcatcttcatcccaaaatagcacaccctttcttggttattatgtacttcttttgtgttctgctaaactattatatactatacttatgctttcaaaataattcatttatatataattaagttttgtgtaaatatttaacatataaatatttagtagaatctctgaaaggagtgaaggcaaaaactttcctgacccataataattacatacctagagcatcacaaaatctattatcaatgaatggattctgaattctttgataacatgtctttaatttttaggatttaaagtacctcctttaaagcaccagaccagtagtcaattattatgatactcacctctgatattgtcttatccctgagtgtgtaataaacttctggtccctggaatttctcttccctcataaaactgtttctcaatgtatcattttgtgatgacttttttttctgagcttcctttacctacccaataggtacacattttttcccaagatgctacaacaataccagacaattccagatattcccgccttccacttgtgatctgtaaaatatatatactggttggttatgtgcaatgttttatgccctatgccctttcactggtgatgttttaaagcaagcattgtagatgaccatgaattatagcagacaggttcccagtcctatgctgtttcctaatgtacattttttctcttgtcacaactaggaaagtcacgtttcagtgttttggttttggtgaatgcccacaacaaggctagtgaaggaaggaggcatagtaggaagctgttggccagacgagcttttagaagacccttgctacatagagaggacgtagaaaatgtctttatcattaggtgagaaacatgaactgcattctttgttgcgtcatattaaaatgtaaatcacaagaataaattataaaaataaaacctaaccaaaacacaaacaggaggaggtaacagaggacagaacagagttcctagaaaattatattacaggacagacatacaagtacccaagagaaagcaaaattctaaaagtctcttagccaagtgtagagcacaaaagttctcctcagttcatgcactttcgaggcatgtcagttggaaaaagagcatgctataggagacagttttattgtgttttgtgcagtgaccttttaaaagggaaaggtcctttctgagatattttgagttcactcatgcatctgtcatagaatttgcttggaacgaagtgtgcctgtcaccccaacctttcttcagagcagagcctgcttcctcatgggaagaatgatgttttaagagtgtcattcagatggaacagaaagaggtcttctccaggtttgtcttgctactgaatcaataggatctcctggattttgaaaagtatattaaattttttttcagacgtcagagttggggggaactagttttgtttagctttatacaaatttctagcattacttgtacggatatgctggagattctgctgcctcttgcaatctgacagcctcatggagagttgaataaatggtcattgcctgggtaagtgagggctctttctaaagtgttcaagagtaggtcacatagagaggagtgccttcttcctgcattttttcaagtacctgttttcccctattttattcttttggaagggattgattttatggtagtccctttcttttctcacctcttgacagaatgtttttctaaatgattccttcagattattctttaggtcccattaaaagaaacatgctggttcttcattctcattctgtctttatgcttaatgcagatataattcatatttgttttatcaaagtcatttgataacctcttcaatgacaaatccctgattacagatgtattctcttttggtaacccacaggggttgaaattgctctaatttttggtactgtgtattaggttgagattaaaaaaaactttgaggacaatcttttccttatttaatatctggagaaaaaatactacatgtgagaaaggtggaaaaaggatgttgcactgtatgtaataaaagctatgaattttggcacttttgtaaactgtaaagatgtaaatgttccttaattattttcagtagtcagacttatgtttcttccagttgtatttccaggctgagacaatacaaaagatggacagctctaagttgattatcaagctttaaatatgtttcacttgattaagaacattgaaggtgagaatggaattatgtaggcttcactgagtatccgtaaagttgggaacaatgatatacaacacagaaaagaagctccataagaaaacagctgcaactaacccatctggaaagagacctcaatcaaaatgatacttagcgaaagaaaaatactttcagtgatcaaattatttgtctgaccaatgcttggtggaaagattccacattactagttatttgtaatgggtaattgcacaatatactgtattgttcaatctggtgtgaatgaaagtggggagatcttgacaattgtcttggaacaatagatgtaaaattgagactattctgggaaaaccaggatgtttgggccccctggtaatagtctaatcattatacatctgtgctataagcacacaaataacatctagtaatgaaagaaacattcagctaagaaaacttgcagtcaaaaacttttgataaagctgtgaagacttgttaggtcatgtattaatttaagatctttaagatggagagcatcccatcaatgattaggagaaacacaaacattttatattgtgtttaatacacttttttatgtttaataaaaaacatatcacctaccctacaactcataattaacttatataaagttttttttgtttaataaacatttcatattgtgtttaataaaacgcaaacattttattacttacaggtcctgggtgggggcagtacgtggcatgcctggagatgacacacaaggagatcaggaagtgtgggcagggagaatgtggacctgggtcacttgtatttattggagtccagggtgagaaacctaagtgtcatgggacgaggggagcaattgggcagtttaaaacaagcaggcacaaaatttcaaacaacccaacattaaaaaccctttctggcaaagaaatgttatctagaaatctagctgacccaaaggctgagtgtgtgggtttggggtaagagctatcttgcctcaccagagcaacaaaaaggagaagtcatcggctaagctagatagccaaacaaaatggatgctgaggcaacattaaattataagaattataaggtcaagatgggatggagattctggacctggtacaaggaagtgctgcaatgaatagcagggagttagggcagactacttccagtgtcctgagttttcaggtttcatttggctgtcaaaaccatttgttccctagactgtgatttgactggtgatgctggctggcagtgcccctactgatgacttagcagatgactctgagctgacaatttgccatccttcagctgtcttggtaggagggattcagttaccagcatgcacagcacagagcagaatccaacctcatagattttcaaaaacttatcgctaaagtctattattaacagcttggtaagaaaagtctttttcattgagaaatgtatagattattgtgaaggaaaagtatttgctaagaccagactggccgaagctaatccttttgggaatagccttaccaatttgggggaaatgactcatttacttataagctatacctgtcagcttccctttactacctttgacagctcttaaaccagcagtataagaactgctagtgaaaaaataaacattagtataaaactttatgtacctattacataacagtcatatattaggtgtccattttaagtacagatactgaaatagcaaaataatttattggagaaactcaaaatgctatagaaaaatttgacttggaaagcaccacaaatgtacatgatacaagtaaacttgaagaaaccaattacattgggggatagtcttgttttctgttattctgtggacttgctttattaatatatggaatttagagtttcttatatttaaaaaatatgaaaatgcacataatcattcccaggctgctcctgatcctttagtgatgattcctacagaaaaaaaaaaagtgcttgggatggggaagaactttgtggccatcgattttttctttctttctttattatttttatttttttattatactttaagttttagggtacatgtgcacaacgtgcaggtttgttacatatgtatacatgtgccatgttggtgtgctgcacccattaactcatcatttaacattaggtatatctcctaatgctatcccttccccctcccaccaccccacaacaggccccagtgtgtgatgttccgcttcccgtgtccatgtgttctcattgttcaattcccacctatgagtgagaacatgtggtgtttggttttttgtccttgtgatagtttgctgagaatgatggtttccagcttcatccatatccctacaaaggacatggctgcatagtattccatggtgtatatatgccacattttcttaatccagtctatcattgttggacatttggcttggttccaagtctttgctattgtgaatagtgccactataaacatacctgtgcatgggtctttatagcagcatgatttataatcctttgggtatatacccagtaatgggattgctgggtcaaatggtatttctagttctagatccctgaggaatcgccaccctgacttccacaatggttgaactagtttacagtcccaccaacagtgcaaaagtgttcctatttctccacatcctctctggcacctgttgtttactgactttttaatgatcaccattctaattggtgtgagacggtatctcattgtggttttgatttgcatttctctgatggccagtgatgatgagcattttttcatgtttcttttggccgcataaatgtcttcttttgagaagtgtctgttcctatcctttgcccactttttgatggggttgtttgtttttttcttgtaaatttgtttgagttcattgtagattctggatattatccctttgtcagatgaatagattgcaaaaattttctcccattctgtaggttgcctgttcattctgatggtagtttcttttgctgtgcagaagctctttagtttaattagatcccatttgtcaattttggcctttgttgccattgcttctggtgttttagacatgaagtccttgtccatgcctatgtcctgaatggtattgcctaggttttcttctagggttttaatggttttaggtctaacatttaagtctttaatccatgttgaattaatttttgtataagatgtaaggaagggatccagtttcagctttttacatatggctagccagttttcccagcaccatttattaaatagggaatcctttccccattttcttgtttttctcaggtttgtcaaagatcagatagttgtagatatgcagcattatttctgagggctctgttctgttccattggtctatatctctgttttggtaccagtaccatgctgttttggttactgtagccttgtagtatagtttgaagtcaggtagcatgatgcctccagctttgttcttctggcttagtgttgacttggcaatgaggactcttttttggttccataggaactttaaagtagttttttccaattctatgaagaaaggcattggtagcttgatggggatggcattgaatctgtaaattaccttgggcagtatggccattttcatgatattgattcttcctatccatgagcatggaatgttcttccatttgtttgtatcctcttttatttcgttgagcagtggtttgtagttctccttgaagaggtccttcacatcccttgtaagttggattcctaggtattttattctctttgaagcaattgtgaatgggagttcactcatgatttggctctctgtttgtctgttatgggtggataagaatgcttgtgatttttgctcatcgattttgtatcctgagactttgctgaagttgcctattagcttaaggagagtttgggctgagacgatggggttttctaaatatacaatcatatcatctccaaacagggacaatttgacttcctcttttcctaattgaataccctttatttccttctcctgtctgattgccctggccagaacttccaacactatgttgaataggagtggtgagagagggcatccctgtcttgtgccagttttcaaagggaatgcttccagtttttgcccattcagtatgatattggccgtggatttgtcatagacagcgcttattattttgaggtacgtcccatcaatacctaatttattgagagtttttagcatgaagcgttgttgaagtttgtcaaaggccttttctgcatctactgagataatcatgtggtttttgtctttggttctgtttatatgctggattacatttattgatttttgtatgttgaaccagccttgcatcccagggatgaagcccacttgatcacggtggataagctttttgatgtgctactggatttggtttgccagtattttatggccgtcaatttttgaccctgagagtgaacctcacctttggaagttactaccaagcatttgacttttggaagactctttacacagcaagagatctcctccacctttgaggtgaggacattaaacttggtttaaaaaattacttttccaagtacattaactatgtcttatatattatccatacacgattactaagaaaatataaacattttttcatatactggttaattggctttaaagaaaaaaatcccctttttaatcccatcaggatttagtttgacaaatttttcagaaacttataaagatgaaaacacctggatgtatttctctgtaaactttggctgttagcatcctttttcaatgcttgtgtagtttttcagaacagaacctaaccttcaagatgagtcatttgttcccaaacttgaattgtcatgaaacactccttgggtttccctcccgtgctgaatatgatttctaagaatgggatggcatggttactgtataaagatcatttgttctacaggtcagaaggcctgagttctcatcattaattaactttgtgatgtatgttgggtaaatcacttaacctctacagttttatcttctgtaaaatatgaaagaaagactttgagctaaagtttgtttctactgtaagaacatgagatattttatcttggtgacatcatggcttatgggcaggctgaggtgggattagtaattgcaaaagcagtggtcataaggtgaagaaacctggacatgacttcagacttaacctgggaaataaaatcagggaatgtggacaaagtcagacactactttagcacaggatgagatgccagaagatgatggatccaacaaagacatgcatgaaaggccacggggctgtttctgggcttaaacaagctagtcttaattaggagaaaaagcggagggactggaggagtggaggagaggaagtcaatagtgatgcagtacttccatcctagagggtttcttcgagagccaagagttccaatctgtgcatggcattaccccttctgaggtaaaagaaaaagtcctctacaaaaacctgacagtattctgccctcaagccccttgttaaccaggccaaggtgaggcatgggtttcatgccctactgatagcagtgcaagatgtcttgttatgagtattgatatcgaagtatgcttttaaatcatatttcactctgacaccgttagctacgtaactaagtcttagtgctattgccagtggtccaatctaaatgatgtagtagagaatctagttcattactctgagctgggactctgatgaagatgtagggtgacacactgtctttgtgaagaaggcatgtgtggaatacttggtgtctttggtgagatggcagaacttaaaccgtgaggaggatggcaatcatgaggaatggtatcaggaagtttttccagcttgatagatgggaaggaaagcagaatggcaggaagggggccaggtgctatctccttgaaggagggatgaaccgtcctcagggtctgtctgctcacaggcaggagacttataccagaactgtgtttactggaagtcttttagagttcaaagtgaacttatctgagtttgacaaataatcccctacagcaagacaaagagtagtagatgaattatacatttggatactgttggaaagggagaggtaaaatccaagttggaataaagcatatgttatgggagatcatcaatatcattgagcacgggctttgaggattagagttatgatgaagtataatagtacagaatcagcttgagacacagtcttatgtttgttttggtcatctgcctagaagtaaggtgcagaaaatgcttatactttgaaaagtcgtgaattaaatagaactttctagcaatggttgatgaactgggtgggtgtcaaaaatcaagacttcatgattgggaagctgtggggatggggaattttcttagaaaagagagagactctaaatggtgctagtggggtggcctaagccctgacagtggaatgggacctttttggaagactgcacctcggggtaaggatgcttgtgaccctgagactagcatcaacccatgatagaacccaagggtgcagaaacctatgatagaaagcaagggtaccaaaaccttgagggtgttggcagactgaggggcactcagttcacccagggacatccttcacctgagaatgacttttctagatctccctgcagtggttttgagaacctgagtcctagttgagccttctgtgatgccttccaagtcctagcagtgtggcgtgcccacacatctttctcaacaaaggatgcagaaataggaatgtaattagagcagttcatcctcggtagagagtcctttgtggttcccagctgggcagtagtttaaaggatagccctgtgaatctactcaaatagtatctttatttaagatgtcaataaaaggtagtaaacttgagaatctctgagaagcattgatccatagtggaaattacatgtatttaagtatgaaggtagtaaatatatattaacaacacattatatgccagatactgtcctgggtatgagctatagctggaagtcagagcggtacaaaatctaccatgggggagtttaagaccaagttttcaagccaaacggaactggattctactaatttccagactgatgccttggagaggttacttgaatttttctgaatgtccattttctcatatattaaatgaccattataaccttgctctgtaagactgcttgttagatgatataatatctttcaaatatctgttaaagtgcctaataatagcataatagctactcaataagtagccataattgttttaacaaatgaaatttagactcctaggaaaattagaaagtactgcactggctttcctgttttcctaatggccatgattatttatccagtgactcagtgcagattttgatttattttccttttcatagccaccttatcaaaaagtcctgctactgttatttctacttcaaaatgcatctcaaatctattcacctctctctgttcccatctgtatcaccctagtccaagctctcttactccctagagcaatagccggtaaccatgtgcttacaacacattctctgcaaaggcagcagagtgtattttttacagcatatatcagaccataagggcctcttgcttataaaggaccagtggatttttattgcatttactatccaaatctgaagttgccatcataaccagacttctctcattctcttccatgtcttctggtatcacattcctgcactaacctctacaccctgcgtcctcccacctcacctcagcttcaccgtgttctcagtttccagcacgcaccaagctctgtgccacttcgaggcctcacacctgccgatctctctgcctatgattctcttctctatgctctttgctgaaccacctccttcttatccttctgccctcagccttacctcaaccagcccatcattctctcagcctccaccgtagcacttctcatgactggtgcttgcttatttacatgttttctcttgcgcattggccaccacaaaggtaaattcttatctgttgtgtgttcaccttggaatttcccatccttaactcgataggaggctcttattaaatatctttgtaaataaatgatatttttatgatagataattgcagattacatgattgttcagttgttaactctgtgcagtcgtagagtattctggttttaaagattagcacttggtttatatgtgaatgaactttcaaaattagacacgatcttctcagttttcttgtcaaagactgtttctaaagatttgcatgagctagtctggtcctggctatcttcctatcagggatgcattcctgtattggtagattctgtagattaactttctaaatcattcatggcccttccttctgcgccgttaactaggaagtataaagtactttagaacatttcattattagtattcccaatatgaccgtggaaatgtgggcagtgggatgaggcaatcaaactgaggttttctttcatgataactatttttgaaaactacctgcagtgagaaagaattctcaagcaggtgcagtggtgtttgagagaagcataaatggagtggttgagcccagaccttggagtcaaataaacctaggtttgcatctcagctctgttgcttacaagctatgtatttaaactctctgatctccaaagtggttttggtgattcaattagatcattcatacaatgagagtcttaacaaatggtaagcatttttaacttttagaaaaacacaaggcagttagtagacgaagtgtatgaggacattgctagcttaatataaggttctttaagggtaaaataaagagaaagggaagaaaggcagagttctttcttttttaacttcttaaaccttttcttatgaaaagatatgccacataaccataattcatcctggcaattaggtaaacagtatacagaatatgactctcgccattaaataaacttaagcaaggtatctttatcctgaaggaattcttagagatttcatcatgagtaagcacttttcagtatagaattgccaaaatacaaaagaacaccagagaaccactctaacttctaaaaaaaataagaaacccaaaaccttgtgattgaaaaaaaaaaaaaaagtaagaaaaagaggcccttagtcattctgttcccttttgggcctctatctttcatttcctctggggaaataaagttataaactgtgctggcagtaatctagggtgatgccaagtcagttacccacccccaactccatgtctccaaaagattctttaccaccctttgactctaattaaagaaaacaaatgtttccagttttctgtcatgtacctttccactctgaattatagaatagctttcttgaaattcttttaattgttttttacaaaggattagcattaaattcatagataaaaataaattagtaatagtgatcaaaatgacctaactccactttgtttttacttttcttctgggtaggagggcaaataacataactgcttatatggtgatttattttaaattgaatctgaatttctatttcttaaggcctcattggcttcatggcaaataagagagttttaaagaatttattgtgttaatttctgagaaaccaggagtttactgttgacaataatggcacaaattacaactcctacacagctctaccccctccacttttgagtttcaagacttttgccaaagttttctggtctttgttcacttctattattaacatctcttgtgtgaaggggaattttgaatgaatgggatgaaatcatctaaaccagcttcggtcctaaatatagtgtctggcatcaggtctgggaaaaaaaaaattggtcaaagagatagcctgaggttatttttaggaagttggatgtttagggaaattgatactatgaaagttctggcctctatctctgaagatattccattgagagatacatgcatgcattcaacatctcgtttttttccattcctgccctttgggtgttccgcgtcattcactatcttgtcattacagcattaagcagaagcttgaggcagaagatagctaatgcaacgtttccatttggtcctgtaatttttctgcacagagctttataggatttcatttcgggttaataaggggaagttggaaccgaggagaaagcttatgctctgccaacatatactgaggattactaaacttggaggtagaaaatagaacacaggaataaaaatggaaaagtcctggcagatttctccgtagcagacttcatccttaaaaagcagaattccatccagctcttcttggtggcataattccttatcatggaattataagataaatgctctgtttttatgcgtctctcttttctaaagttgaattgagtgtctgaaagacagatgatgtgtctaataccaccgttgttttacagaagggaaatctaagaaaactatagctaccctcctgggaaaacatatctaggcatttgctaacagtcatttaggctgcatctatgcacttccacacagaaggataaatgtcacatgttcgttgaatgatccagatgtttcaaatatacagttgttttatatttggtaaacaatgcagttaggtcatgtaaattttaatttttcatttggagtttatccctatgcaggcaatcatagattagaaagttatttttttcatgtcctacctctttgaattgtcaggttcttttaaatgctgttatgtagcaataaataatattttatccataatcaaggtggatgacttactggatatcagatattattattaacaaaaagtttactacattgtacaagtatcactagacaaagacaacctctagaaagttaattaaggtaactaaggttctcaactgcaaccacaaaactttcacagttaataataatttcacagttattaacataactttttcaagaggtactatactaaaccaaggatgctaaatataacttattaatttctgtgatggcttctggggatatcaatattggtatactttcctcactgcaatgaagacacttctgcatctacttttgagatttttttggtcatctttctagcagccagctgtcacctcttgctgctgtaacagttcctagtaatagttcccttattcttcaaacctgatgttagcagggaggtcagatactcaagcatgattagaattgtagaagcttgagcctcatatttaaatgtgtgtaaatatatgtttgaaaaagaattaatgagctcttaattgcagatcaaaggatatggtttgatagtgaagtggcccaatgaaagttgtttgaattttccttttgtctttctgtaaatggaactgtgttcttgaaagcctctacgtctttatcttgttcctcaagattcttagggcagtgcgtgtgggtcaggggtaggtgtgtctgggaattaagagtatctagttgatttagtagctatatttctcttctttagcctgtttattgggaaatgaaagacaatttaggctatttcattttcagtcagtgtctgttatgaattcattggaaatagcaatgtgaaaagaggaatgaatattgtagatttctttcattgtcatatttgtaaattactgggtgggatttataaacaaattattgactaattatgaacaaactgttgtttttttcttttcaatcaatatgaacaatcaagtgacctaacaaatttaattttaaaaatagatttgaaaggtatatagtagttaaaacaaggccccttgattcagattgcctgagttcatatctcaaataggctacttttttgtggtgtgcctttaggcaggatgcctcagtttcctcatatgtaaaaaagaaatgttaatagcagcttaccttgtggggttgttgtgagtgggtcaaatgacctactatgtgtaacgcactagagcagtgcttggctggagtaagctccatgtaaatgttagtccttgaatgaaagtagagctctggtagagatattccataaagacaaccttaaacatttttgaaccttttatgcctccaaaatatacacttccaaactcttctatcactgaccatattacttataccctaacaaggaagttattaagaatcataccagagtacaggaataaatcatgccagtcaggaaaaggggtacattggttattctatttataacattacttgagtatttataacaacaagtaaacaaaacgttttttagaaaaagaagagattactgtgttgtacaaatattactagatgggtaatttctctcctttttttccaatgtattccagaacccccatggatatcaaaattaaatgctcaaatcccttacataaaatggcatagtatctgtatactttaagcagattacttataatacctaatataatgtgaatgctatgtaaatagttgccatactgcatttttaaaattaatattattttttaatattttaacctttttttttttttttttttttttttttttttttttttttgagacggagtctcgctctgtcacccaggctggagtgcattggtgcaatctcagctcactgcaacctccacctcccaggttcaagcaattctacctgcctcagcccccaagtagctgggattgcaggcacaggccaccacacccacctaatttttgtgttcatagtagagacggggtttcgccgtcttggccaggctggtctcaaactcttgacctcaagtgatccgcccaccttggcctcccagagtgctgggattacaggcatgaaccaccgcgctcggccacatgtttttaacttttatttttccaatatttttgatctatgattggttgaatttgtggaagccaaacccacagacatggagagccagctgtgtattgttattgtcatgtcttttattctcccctgttcttttctgcctaaatgccttaggtacttctttacagagttagatagcatttaccattgataccacccagagtggtgtggtttgcttctcctgaccctttcatgagcaaagctggtttcaggggaaactcagggatctgaactgttagtaacactgattagaaatgcagcagttttattcaggccttggttttattgaccatttttggttggctcttatctctgtgactgatcatgtatgcgtatttcaaatggataaataaactaaaaagtgtttaatactccaaaatgattagaagtgtattgttaaataccaaaaagaaaataattctggggtgtttcagcatgttattctgttaacatagttcacgttgagtgtttgtattcatttgttgtttgtttgtttgtaagtaacaggttttgactaaaattccacggactgtggaacagcacacactggggtctatcggagggtggaaagtgggtggagggagtgggtcaggaaaaataactaatgtatactaggcttaatacctgggtgataagatagtctttacaacaaacccccatgacacaagtttacctatataacaaacctgccattgtacacctgaacttaagtaaaaaaaaaaaaaattaagtcatgtagatgcgtactttgaggtacaaccacgtgaatgattgtgccaaattattatgacagaaaagtctattgttgatttagaaaaagaattaacactgggcatcatttgaataatgggctttataaagaactgcacatattggttactggtagtaaaattcacagaatgttagatataaaaagtcctaaagggtacaaggaaaacttggtttgtcctaggtcaactagtaagattaatctacaacccaggcttctgactctatttcaacattcttctcataatgtcattgaggttacacttaataaacaacgttaaacactctctcttttaaaaaaaattgttggctatacatgttggctcacgcctgtaatcccagcactttgggaggctgaggcaggtggatcaccagagttcaggagttcgagaccagcctggccaacatggtgaaaccccgtctctactaaaactacaaaaattagctgggcatggttgcaagtgcctataatcccagctacttgggatactgaggcaggagaatcgctggaacccgggaggcagaggttgcagtgagctgaaatcgcacattgccctccagcctgggcgacaagagcaaaacttcatcccctcccccccaaaaaattgttaactactacaagcataaatatgaatatctacttacctgcatttctgaagctagaccataagtattaacagtgcttatatctacagtccctggcagatagtcggtgtaagaaatatagattaattgaatgaatcatatgatcatggttaaggttcttcttttgtgcgttttagcatttttaaatttttacattgatcatgtattgcttttgaaattttaaaaaacctggcaaaatgtaattacgatagaaactgacatcaaaaagctttgtagctgaaatagtgtaattttacactgagtttgaaacttctgatatcaggaactttgatgagcctaatacaggtgctatacgggatgaagtgaatatgcttagaatttttgatgaaaacaaatctgactactcaggtttctctatgagaagggtaggcagtttgatttgtaattatgggaagctgaatgtgaggcttggatgaggctttgtcagtatcagaccagctccttcctattgggggctgaattcccttgggctctccatcagagagaccaacaggaagcaatcatgtagttcttccaacacactcagaagtcagtaggtccactccacaaataaattgtaattggccatatagtaaaatatttggtagtgttattcttgtccttttccatatgtacaagagagaaaaataaaacaacttcacatcctcctaagcaagtgatcgagtttagatatttgtcccctccaaatctcatgttgaaatgcgacctcctcatgttggaggtggggcctcactggaggtgattgggtcataggttccctcccagtggtaatgagtgagttcttactctgttagttcatgcaagaattgatggtttaaaagagtctggtgattctctcccctctctcctgcctgtgctctcaccatgtgacatgtctattcctccttcaccttccagcatgattgcaagcttcctgagttcctgaccagaagcagatgctggcaccacactttgtgtatagcctttagaaccatgagccaaatcaaccacttttctttatgaattattcagtcccaggtattcctttatagcaacacaaaacaggcaaataccggagcaacagatcagaataaataacgctgagaggacctgacctgatttgctataggtattgttctagggtagcccctggtatccattgaagactctgaccgtgagctctgcctgcattaatataactggaccaaaggaaacagaactttagttttatgaatgggtgtctctccaaacaatttttcctggctgagctttgttcattaacatttttcaatttctaaagaacaaataatctccatttctctttttatgtccggcccactctcctgatagatataacctccctcctgtttagttccatgaattgtactccagctgcccaaacctgagaaaaggaattaatgactcattctctctgttgagtgagggcttattccagctggctcgcgctattctgtgtgtatggattctgtcagcagggttgaaataagatgttaactggcagttattcattaatttacagcaagaacaatgacttgactctatgtcaaccatttctgaaacattttgactaacatttttcctgttgcttagaactgaacttaaaagctgggacaggcatatggaaagaagcaaggatccccagttatgctgattggaactaggactaatggttttaacacagaatgtttatgcatgtagaatgaaatacacacacacacacacacacacacacacacacatacacgcacatacaaggggtcatactttatgtttgcattttcctctaaaagtatccctaagagtatttgtggttagtactacatttttttcatcatagtttgtttaaaagataaagcagatattataattattttctttacaggtgggaatgagttaaacaataattaactgaacaaaagcaatgtccaggtactgcaaaactttacataaattactcctattcattttcacagcaaccctctgaagtaaatggtattatcccaacttacagatgtggaaactaatactaattaacttacctagaatcgaggtggcagagccaagacacgaattcaagtttctcttcctcaaatttaacattctttcttgtacaaatgtaaatgttctttaaaaatgaatacataatggcaggattcatatcaattttctgccagaattaccatgtttacctgaagtaaaatatgctcataaacaaagcagaaagtgcagctggtgcttacatctaggatgattaactggcatgtacagaatttttttttccttcaattgcaaagtgaatgcagtaaaattacagggcaatgggtttcttcccacacaagacaaggtgatctgaatgatatagaagagaaatgccacatgtggaaataatatatcaaggatttattatgtgtctgtggtcattcttaaggtcatttttgatgtctacacatttcagcatttgagaagttgtatattacatgcatacaaacccatattcaaatatacaattggctaaacaagtatttgttttaataaagtagtagtaataaaatatttatagcaaaggggacaagactcaggactgagaggaaaaactcaattaaaaaaaagacaacaatacttaaatctcttgatgcatctacttagcaatgtctacaatagcttttttaacactatcagaatatagagcataaattataatgtttatcctgcttttaaaggaaaatttttctcttatgcaatcatggtgggagaaaagaattcttaacgtgattatttgtctcatattttattttaggattctgttagtgtttttaggattctatcaatgcaaggtgtaagaacatgtcctggcagttgaaggaaaggctaaggaaaaagatgaaagagaagtgtcgcatcccttaccctccttttaaagaaatgctgaagttgctgagcagaaggtgccacagtcatgtcccttaatttatccctcaaccttttccagaagtaaagtgactacacctaagctcagacagtgacagtcgtgggagaaaagctttatagaaacagtgataggaataaaagtgtgtgcactgggatagatgtattttttaattacagaagtaactactaatctatataagagaggctccttccactctcagagcttccaacttaaccatctgtgaagagtaggtccttcaaaaccaactgtagcggcaaagttctgagatgatatttccagactcagcagataggaacaggcatgctaggtgagatatggcagggaatattagtcagggttctccagagggacagaaccaatttgtgtgtgtgcgtgtgtgtgtgtgtgtgtgtgtgtgtgtgtgtgtgtgtgtgtgtgacagagacagacagaaagagagtgctttagtttaaggaattggctcacaattatggagactggcaaatctaaaatcttcaggctgggttggcagtctagagactcaggaaaagctgatgttgcagtttaagttcataagatttctgttgtcagaattctctcttgtttggggagaggtcagtcttttgttctattcagatcttcaaccgattgaatcagccccactcaccttatggaggacaatttgcttgactcgaagttcattgatttaaatgtaaatcttgtctgaaaacaccctcctagaaatattcagaataacgtttgacaaaatatccagggaccagggaccatggcccagccaagttgacacactgaactgaccattacaagtctagttggcacccatatacatctccttaagccattcttaatctccaaatgtggtcacattctgaggaactggtggttagagcttcaacatatgcattttgaggagatacagtgtagtccacatcatggaggtagccctagaatttttttgtttccattcctattggcagagacaattgaggaaaagggaaagttccctttcatttattttactctcctgcacatctaatctttaaggagagaatagaatgagagttggggcacaaaacaaggattgaagggcagctgacttgagtccacgtagccccagaacaaagcaaaggaacattagattagtggggtagtagagattaaagaagtaaacagaattgaaactggcagaagatagggtcattgtagagtggaaaaacatatctgaaacatggttgttaagtcataagctaatatttggaaagacagactccacttacttttttccaatagatatatatttactaaaatcttgggaaagctaagcttatgatcaggtgtaaccaggccatatcccttgggtcccaaagtcaataagcagggagagcttggtgtttaagtccttaggaatgggtcatgccactcagaaaagagaagagatgtttcgatctgtggattgttatcatctgcaacccaggaggctctttgattcttcatatcacgttatttttacctgaggattgtagataccctacagtcttaaagcctctggccaatctgccttggaaccacaggatacattaggcaaggtctggggctggctttgacaaaggacacagtattgctggcagaagaaatcactcttaaagggaatatagatgctactgtgagagactgatcaactaattaagatcttgttgaagattctcaaattgagtttgagcttgttgacaaaaaccaggcttaggcagagggatgatgatcctgagagcatcctatctccatcaataggagtatgttttcaacctagtggtttttttttttaatttttattttaggttccagggtacatatgcagatttgttatataggtaaactaatgtcataggggtttgtaatacaggttacttcatcacccagggattaagcctgttacccaataggtattttttctgatcctctccctcctcctaccctccaccctccaccctcaagtaggccccagtgtctctttttcacctctatgtgtccatgagttttcatcctttagctcccgcttattagtgagaacatgtagtatttggttttctgttcatgtgtcagtttgctaaggatgttggcctccattcttgccatgaaaaacaacaggaaaataaagcactacccttgagcatgcctctagaacttgaggttcaagaacaacagaagagtggcagaaaactatatcttaaatatattctttatcttttgtcagtcctcaatctggcaagaacattgctgctacctgacctcatagacatgcatttgaactcctacttttagtatctgctctaagatctgatttaagaacagatagtagaatagaataagcttggttctctaggtatcaattttcccaaatttcacagtagttctatgtacagtcacattgtatattataaaatatatgtttaactgtcacatgcaagtatatttcagtttttaaaagctcaaggtgcatgctgatagtcactataaataaataaatacatatgtcaacatctccctatccccaattcctccctcatcaaaaactaaataaagggcaaatgaataaataaataaaaatgtttaaactgctgaccttcctgtcaacaaaggtgatgtgagttacaagaatctgttttctagctggagatgtgggcgcagtcatgagtatgcctccaccattaacagcactaaacccaacgtactcacaaacaacagctgcatgaaaaggccaagcttagtatcatgtgtaatttatgagagcttgttaaaacacatacatgcacacaaagttgaatgaataataccaggtgatggttaggaaacagaaaattcctgaagcatctcttctttttaatgaagtatcaaaaatactgttttattaaaatcgggagaaaaaaggctttaggccaagtgtgttgggttggccttgcaactctacttcggttacaaatttaaaggccaaagagttagagattgtgtatatgggtatgtgtgttgcaggttggggtgtgggacatatcaatacaataggtaaaatgaatggtggattgtgtctgggataatgtggcatattttatctcaaatcccaaccttatctcccaataggagatttggatcatgagcaagatttggcttaggctagttttcaattcccaggattccagctccttcatagcaccacccttatgcttactaatcccttcatctttaagacacctggataatgagctatctgcatggttggaaatagtctgggtttgttctaaattttacattagataacaggtcagcaacaaaataatgggagggggaaattagaaaacattaagtcttatttcatgtcatgtgatacagtatatatgtatttttttaataaaagaaagtgacatatattgtagttcaattggatatttacatttcatgtagaccataatggtagcggtaattatagaaatcttagcaactttcaaaggaaatttttcccagcaagatgactgacaaaatttttgaaagtaatagagagaaactgaggcataaaatttacctgaaagcagtcctgtttaaattggacaaaataattaccttttcttacatccctcttttagagttttcctaatatcatttaatacatagatagtactagaaagaaaaagacattttaaattaagaccaatgtgaagcattatacccatttagtatcattttgcccattacccttatagaaactaaaaatagaatgagtgctcagagtttgtactgtaactgcctgccacttacatgggataactatttttagttccatcgtccttattaaaggctttcattatgagttcatttatggaaatgttatctcacagagttttttttggagacttttctgagatctcaaaatgaggtctcagaaacatgattagaacatagtcatttagtttcccagcaaatgctgatcctttccaggaaagttctataaataaggaaccaaagctggttgtcagtaatttgaagtagctgggttggaccgtgaatattaatatgtaaattatagcttgtgccatctatacacaaccaggattgtatgcatatcttcccatggtttattttaagtctgaatttgcatacaaacactggtctaattgagtttttaaaaaaaattcttaagagatgccatgtgttacttaaagatgttttgttttgaaactttgtgataggtaagatccactaatgtttgtaaaatttaccatttgtaggaaatattctattctcagtaattcctggtgaaagtggtaggtgggttagagatcataaaatccagtcttcacgggaccaagctggaacatggctgggtagctggtggggtagtgacagccctgcttcaaggagagatcagaaatgagggatgagactgagtgcaaagtcaaggtcaacacaggctaatcttggcttttggctacttttctgtaaagagtaatgtttctctatttgaaggagtgattttaattcagaagtatattggaaaagtgaaagaattcctagagaaaagttaatcccagacaagatagtgaatgacatatagtttattatccagtgacctttagcacaacaactacacatatgcgcaagcgtaactgctgggctgctctggagttcgccagaaaccccttgcccttagtttgaaggagggaaagaaatatctgtaattattgctctatatcctttgcttttgacataattgattctctggcatttaaaatttatatccactcgcccataggattcttttaactctttcattgtttatttccttgtataagaacaggtctgctagtcagagagaatgttgagtatctttcataatccttgtctttatgggaccaaacatttctgccttgtgctagaaagatttttcagcccagccccaggcaaccaccattcattctactctctgcttctatgagtttgactattttagttacctcacaaatgcttttgctgcatttgttttgtattttaattacaccgtttgatggcaatgctagaaatttaggagctacagctcctctctaacatgaatgctatcttgtcaatgccttcagaagaataaagatcataattctttcttttacattgtgatttctataagaatagtttcctatcttcctggatctagatggaagatattaactttcagactaactgttcactggacaatttttctttcattattcctaaggtctttattgtacatatgatggtgtctccaatagttaaatatgcctctaactacaacatataatttaaactcatacctcacctgggattatattgatgatttttggttcaactatttctcaaatttgagatgctattcagaatttaagtgaggtctaataccataggcagggattagaagtccaggccagaagtctgaagtcatcagcttgggttctgttgatgtgaagtgaattggatcacacagagatagacatggccacagtcaggtgtgatacttgatgtgcctatgctttgcctcttagccagttcttagtcattccatgcaccgtgctccttagtagaagagagaacccttcaggtagacttctgtgaaatcctcacaaggcacagaaatttaatggcatttctgagagtcacaagggttctgtgaagtagaaattatgctctcattacattagcttaatgctgagtatattgggactcttgtaaatggacattttgttcatggatattttgttttagcaatttaaagaatgttaactagcttaatattttagagtgaacattttaaagtgataaagaaaaataagaaactttcttatctcaattaaaaatatatatgtatttttggtccacacaaatcacatcacccaaataattcagagcactttgctagaaaaggcaagacaaggtgtttctgagagtgtctccgcatttagatagactatttagttccatacttagagatcatccactagggtttctttgagcttggtgaagaatattcagcaacttgcctaagctctgggaatgtgagcatcagttatgaatataggtcatctcagtttgtgcacagcacactttctgtcagtccaatataaacttgtatgagtagatctgtttattgtgataactacaacttatattaacttgttgacatgctttttctaacttattttcttgggtctgcatttttcaaagatcaaaatttctgcatcttcagcacaagtagattgaagaacacataatacggatagtgattaggaacattcaggcatggggaacgggtgacatattgtttactgtgtttaaaagatgtgttataaatttcacttagtcaaactaacttgatgaaatcaagatagcctatgaggaagaataagctctgcaacttacatttttatatgggaagaaataatgagtcagtcttcttgaagttttttacattattatagtaagaacatttaagatgagatatacccttttaacactttacattttaagtgttcaatatagcattgttaactctagataggacgtttcatagaagatcttagcatctgacgtaactgaaactacatgcatcgaatagcatctccccatttctcccacttcccagccccaggcaaccaccattcattttactctctgcttctgtgagtttgactattttacatacctcattgataatggtttggatgtttgtcctctccaaatcgcatgtagaaacatgattcccattgttggagatggggtctaatgggaggagattggatcgtgggggcagatccctcatgaatggcttagtaccatctgcttggtgataagtaagtttttgctctgagttcatgtgagatctggttgtttaaaagtgtgtagcacctccccaaccgatctcttccccttttgccttccaccatgattatgagcttcctgaggccctcactagaaatagatgctggagccgtggtggtacagcatgcaggactgtgaatcaattaaacctcttttatttcttaaattacccagcctcaggtatttcttttctttctttttttttttttttttgagatggactgtcactctgtcactcaggctggagtggagtggctcactgcaaccttcgcctcccgggttcaagcaattcttctgcctctgcctcctgagtagctgggactacaggtgcgtgtgcccacgcccagctaatttttgtatttttggtagagacagggtttcaccatattagccaggctgctcttgaacttctgaccttgtgatctgcccgcctcaggctcccaaagtgctgggattacaggcgtgaggcgctgcgcctaaccatatttctttatagtaatgcaaatggcctaacacacttatgtaagtgaaatcatgcagcatttgtcgttcttgactgggttatttcctttagtgtgatgtcttccaggcacatccacattgtcgcatataatgaagttttaataactgttctaagacttagctgaagtcaaatggaatgcttctggtacttccctcatagcttatctcctggccttgactatggccatttcctattcccaccctgctctccaaggtggtattctagccatccttcaaggtcctgtgcgaataccatctcctctaggaaggcttcctttggtttcaaggcagagttcaatcgtaccccatctgaaaaccaatgacactttggagtacctcatgatagcccttcacaaacccctttaatgtgactgtgtgtgtatcgtctctctacagtgagaataaaagctccaaagccaggaactatatcttcctcacttcctcattctccacgggaccttgcgtttaataatttaacgaaaattcaacaagtatctgttgatggataaataatcatggaaaataaattccagacgaggtcagataaagtggattatatgggtaaacattgtggaaagtaagcttttcgaaatattgtaactggtgaaaagttgtccatcatagttaatgggctacctgagcaaatacctttcctgagctttttcttgaattcatagaaacttgggtctgaaagaaaacttacaagtcatcactttttttttttttttgagacaaagtctcagtctgttgccaggctggagtgcagtggtgcgatctgggctcattgcaacctccgcctcctgggttcaagcgatttttctgcctcagccttctgagtacctgggactacaggtgcacgccaccatgcccagctaatttttttgtatttttagtagagatggggtttcaccacgttggccaggatggtctcaatctcttgacctcatgatcctcctgcctcggcgtccaaaagtgctgggattacaggcgtgagccactgcgcctggcccaggtcatcacgtttagcctctcagtcctctatgttagaaaacagtaatccaaaaaaaaatgatttctttaatgctagatagtggctgaagtaggactagaactcaagtattttaaagcctgcttcacatttcttgttactaagctgcactgcctcccacacatggcctattttggtctctaaactgtcatgaaaacagatgctaggtccctgtcaaaatgtttgtgtatttctgggtgtgaaaaggtatgtgtgtgtatgtgtgtgtttgtgtctgtgctcatgtgcatggatccctggtggaggggagagaaaggcaatttgtagctgcagacttctgtcattgcacgcagcgcactctgccatggtgagttcatactccacagcaacagaacagctgctgcaaagggttggtgtgctattttcatcttgggtgtgtgttttgcatcaggctcttggcaatggcaagagtaaacctctgtaaagaacaccttcttaaccttttactgttacccacacttagtcaacagaaacaatatgtttaacaggagtttttcctgctggacagttaaatatgcagttcttgcatatgaaacatgaatattttgttcccttctgtggaatagcaataataataacactactagtaataccagctaaaatattttaagtgcttatttcaaacggaaaattttttttttaaatgccagattttttctctctagggcaacagtcatcttgtataactttgaattcacactaaaatcctctgtagcaacataaagatagaaaaatcctcctttcagcaatatggcactgtgtgcaatgagcaaatgcaatgatatagaaggaagattgagtttaagagtatcagcagcaaagtgacagaaacgctcatacattaaaaactaaaaattagacttaattggttataggtgggaggagcctattacttttggtgaggacacatataggtgggaaaaagagaaagaaaaaaagaacatatctatgacaggaagcttcacagatttcattttcataatactttttgagactaaaggaaatagaacattttctgtcatatgtgttccaagtaatgtcattctgtttctcatttgtcttttgacctggctgtataatgtatgtggtgaaacagaactcctttattattaattttttagtggctacattagtaactcttttcctgacaattatgaggaagctcttgtatattgacaagagcataaatctatcaacagccaggttcatacatagagtccacctcttaaaggttataagatactgggcaagtcatttcatttctttaaacctgtttcctcatctgtgaaatgctgatagaatcataccttacatagatcagatgtaaataaaatagtcgtaagttagcgctcaggaaattacagtattctgtgcaaatcttattaactttgattttgtttcatatattgataaatttacatctagctgaaaatacattgaatcattgtcatggactaaattttaatatgtcttaggaaaagagtccgggttgaagtgcagtggtgcgacgttggccccctgcagcctccgcctcacaggttcaagtgattctcctgcctcagcctcccgagaagctgggattataggtgcatgccatcagacccagctaatttttgtatttttagtagagatggggttttatcatgttgaccaggttgttctcgaactcttgacctcaggtgttctgccggcctcagcctcccaaagtgctgagattacaggcgtgagccactgcaccggtccaggacaagaatatttttgaaactatgagctttatcatcagagacattaaaacttcagaaggaaagagacctttgagttcttctgagccaactccttccttttatcactaccaacaacatgaagtcagagggaaatgacttgcctacagtaagatgagcaggaagaagtgaaagcagattaggggctgaggtcttcttagtttatgtccagagatctttccacttcacccaccatactctacattagtcactaccacgaccatcatcatcattatgaccaaaattaaatctaaacaacttttcaccaagtaattccattttcatgctaaagatcaggcagttcacttccatttcctcttttgtcagatgaaggaattgggccgggcgcggtggctcacacctgtaatcccagaactctgggaggccgaggtgggcggatcacgaggtcaggagatcgagaccatcctggctaacacggtgaaacctgtctctactaaaaatacaaaaaattagccaggcatagtggcgggtgcctgtagtcccagctactcaggtggctgaggcaggagaatggcgtgaacccgggaggcagagcttgcagtgagctgagatcacgccactgcactccagcctaggcgacagagcgagacttggtctcaaaaaaaaaaaaaaagaagtaattggatgaggtgatttatgtaattcctacaacctctcagtgctaacaaagcaacattcaatgacatttacaatgatcatggtggcaagttgggagagagaaagggcatttctgaagtaataataaaatgagtaaaataagatggtagtgccgtgtgttgatattgtgaactttacatttttactttctctcatccaaatcacagtaaaggagctgaaataagattttagttaattggtagccacacatgcccacaggctggtatgccaggctttgtttttctcacactgctgtaccatatccaaggccagagtgaatttcaggtgtcatgggctctacaagggcaagactggagtaggagctaaagtcaagttcccattggagaggattgaccaactgatagaggatggaaacgaagagccaaaggggagaagggacaggaagtactgagatctgaaagcaaattgcctaacatttagaggtgagaatgtgaaatgaggccaaccagggctggtgcagagccagaacaagggaggtcagaaagctaaggtgaaattctggaaataaatatgatgagagcttattgtaggggagacttttgggggactatggcctcgatctgatgtgtctgcttgtccccagtgctccttcaaacatgctccttgaagcttcatgcctgccttagacagccagagattgaaaatgaacatatattttgaaaacaaagacactaagaccattcacaaaaattcaagaagtaattttttaaaaaaaatacagtaacatttaaaaaatatatgttatttcacaacatatgtaaaaccattaaaatacattgacatcccaacacatattttggggtgtcaaaaaagaaatatggcagggtgcagtggctcgtggctgtaatcccagcactctgggaagctgaagcaagaggatcgcttgagcccagttctagactaacctgggcaacatggcaaaaccttgtctctacaaaaaatagaaaaacttagctgggcctggtggtgtgtgcttgtagtaacagctgctcaagaggctgaggcaagaggattgcttgagcccaagagtttaaggctgcagtaaactaagctatgatcatgacactgcattccagcctgggtgacagagcaagaccctgtctcaaaaaaaaaaaaaaaaaagaaaaagaaaaaaaatagaaatagtatatgttgataggaagcttagtgaagaacattaaaaagatttgcttgagctcttggttgccatggcagagctgcgggagctccgggctcagaagatggtggactctataaagaagcctcttgagggagttacatctgggagttgtaatttttcatgttcagcaccagatgttttgaggacaggcaggtgtttatgcagcaggtgtggcagtgcacagaggactgccacatgcctctggctcaagaccaagccttgaggaccacggagataaagaagttccaatgccacctgtcccagtgcaccatgcattgcaacgacaaagccagagattcactagatgcagggagtgaggatctttaggcgaagtgacagctggacagttgtgtgaccaagtgttgatcacatgcatgtcaccctgacaatgaccaaggagatgaaggagatgttctcatccactgggatacgtatcttggccagtaaccatcagggctgaggacaggaatctgtttaacaaaaggaaggagaattttagtctttaaggatgtggggaaaagaaagagagatcagactgttattgtgtctatgtagaaagaagtagacgtgagagactccattttgttttgtactaagaaaaattcttctgccttgagatgctgttaatctgtaaccctagccccaaccgtgtgctcgcagagacatgtgctgtgttgactcaaagtttaatggatttagggctatgcaggatgtgcatagcccgagaaacacccacaggtgtggaggggcaggccaccccttcaaaggcaagtgtcatgaatgaagaaattaaggatagcaacaagtataaggcctatgtcacttgcctttggacaaaggtccctttatatttcaatcctggaaagtgaaatgaaaaaactagtgctaaaattaggatcaaagatagtacaggaaagtgtatttaagtcaaaatttcatgtggcaagtgcttctcctggcagcaggaatatccttgtaccaagccagagccttccaaggtacaagttctttttcactatataggaaccgacagactggcagggtcctctaatctggctgtgatctggtggagtttgaggagaggtgtttctgtttggtgtgaggctcctgtttaccagaagtgttgctgcaccattttccataaacaataaaacaaaatccatgagataattcatttagtggggcaaaaaacgtttgttggtctttgttttgcttggttttgttttatatgtacaagggcataaagttgacttaggatgtggagttgggaaggagagtagtttggataagatctttgaaaggttgcttatgggtatcctttcctggtcatcaagatgtggatgtacctctcttgaaattcttactcactgcatctttcagcctggatatgatgcaaaaacatgagcggtgacttcacatttaggtttgaaagcagagcttccctcttattggctgatggttcctgaggatgtctgcagcagagtggcaggacaatctagcagaaatattttccacttaaagagatagggggtttgtgtttggatttggttctgatatatacctgtatccaggaataaacagtgaaagaggaaccgttggctacataattatgagagttgtgaagtgctgaatttggaaaaacccggctttcatagaacagaatggaatgaaagcccaaacccagcattgcttacgtagcccctgaattaacagaaccctattgagataataccctgccaacagcaaggtcaaagaagaagaagtaagcgacttggctaggatgagctgtgacttccttagagcaaaggaggggcagccccattaccaaataccacttttgcccaggcttttgtgacatgcagtgctcctgcccagcatggcaccttattttgacaaggaccttgttatctttccaccaagttatcacttgaaatgataatatagcttgtatgttgttcccaagctgtcgtatattttcctggttgtttgaatttaacaatgagaataataaggtttaatactcctccctaagaaaagatttgcttatttcccaatttgaaattactttgctaagagggatataatgagttctatagtgaaacaagtatgtgttttatcctaatttctgaaattattcctgaaaattcaagtccattgtttgtctcccaccctatcctttggttctgtcacctcagaactaacaccttgacaaagtgtttcttttttgtccttctaccctccccgcaaaagtttattttttaataaatcgtttctggcaccaacccaaaccacaattacttaaaaagaaaaaaaaaatagcccaggattccatttacttataaacttgctttctgaactttatttttaatttcagcatttttttttttttttttgagatggggtctcgctctgtcgccaggctggagtgcactggcgtgatctcggctcactgcaacctctgtctccctggttcaagcgattctcctgccttagcctcccaagtagctgggattacaggcacacgccatcatgcccagctaatttttgtatttttagtagagacagggtttcaccatgttggccaggatggtcttaatctcctgacctcgtgatccacctgcctccgcctcccaaagtgctgggattacaggcgtgagcctctgcgccgtgccattttcagcattttttgatgtcagttatgggttcattgttttcaatataagataacatgagcagagactgtgtaggtgggattgagagtgaagactgggctcattgacaacctctcatcatctcgtcaagcagagtttcccatatcctctgaatctatgcctgtgtaactccaaatattagcataaatataaaaaattcatccatttggatattttatctacatgatattaattattgaaatgaatctaaattcttttcacaatgattttggcaagaagcactggcttggagtaaagtcagaaaacatgacacatagcaaacatttatagaccatctttttaattgtccatatgaaaagaataacatctagctgattagatgtattttaggggaatttgggaaagaataaataactctatgccttatgactgtcctgatatctgctatttatatctctgttctgggcaaagaacaccaaaaccgaatgaattaattgttgtgcatgctattatgtcttggatatagtaatatcaacatttatacaaatatcgactcagtacagataaaaaatagaaagtaattttcatcttttgtttttaaagaaggaaaaatattattatagaccctgaaccttcttcttcactgaatgggaggaaataaaagatatagaagcctgaggaatataaaataataagaaggtaatgtgatagaaagtggctgaggctatgtagtttgaatctccagaaaaggcctctctgagaaggagactttgagcttggagatctgagtaacaagaagaagccaaccatgcagggaacagtatttcaggcagagggaatagcaagcacaaatgctcaggtgtgaatgattccagctgtggtagccagagtctatgatgcaagggctaggaggggtggtagtgaaaggagtttgcattgtatttgaacaccaggaggaaaccaacacgtagcattaagcaaaaagtggtatgatatgatttatagtttcaaaagattacaatggttgttctgtaagaagataccagaagaagcaaggagaccagatgtggctattttaaaaatttttcgttgatacataataactatacatatttatgggatacatgtgatattttgatatacacatacaatgtgtaatgatcaaatcacacacttaacatatctgtcacctcaaacattatcatttctttgtgttgggaacatttcagatctgttcttctagctatctggaaatataaaatatattattgttaattatatgtcttaggctgtttgtgttgttataaaattaatttataaagaaaaatatttatttggttcacgtttgtgatgtctggaaaaattcaaaattgggcatctgtatttggtgaaggccacaggccacttcccctcatggaggaaggtatagagagcccgtatgtgcagagattacatggtgagagaggaaacaagaagggaacaggaggaaactagcagaggaagaactcactcttagtttctgcaagaggaattaactcactcccgatctccccactccctgggtaaggcattaatctatttatgaaggtttcacatctatgacccaaacaccttccattaagccccaccttcaacactgggaatcaaatttcaacatgaggtgtatagaggcaaacatccaaactgtagcactatagtcactcgaatgtgctgttgcacactaggacttatttattccttctatctaactgtatgtttttgcacattaaccaaactgtcttcattcctcactccctcatccttccctgccttcagtactatatttctactctttatcttcataagattcacttttcagcttccacatatgaatgagaacatgcaatatttgtgcttttgtgtcaggcttatttcatgtaacataatgacctccaattccatctatgttgctgcaaatgacaggatttcattctttcttgtggctaaataatattctgttgtacacatttaccacattttctttatccatttactcattgatggatatttaggttactttcatatactgttattgtgattagtgcaacaataaacataggtgtgaagttatccctttgatgtgcttttttccttttctttggatcagtccccaaattgagattgctggatcatatggtagttctatttttagttctttgaggagtctccagactgttttccttaatggctatgcaaatttccattcaacagcgtataaaagttccattttctcggcatctttgtcagcatttgtaaaattttttttgtctttttgataataaccatactaactagggtaagataatacctcattgtggttttgatttgcatttcccaaataattccaggaaagagatgacattgggttagattagaggggaaccaggggatgagtacaaaagatgaggagaagttagaatctattttagaaacagagtcaacagaactcaccaaatagatgcagttaaggaagcaaggaaagtaactaagggtaacacctgtttgtggcttaagtaactgaataaatgggggtaagacaatatgagacagcaaatatttggggaatattttatgtggtatttttggaaaaaggtgaaaatgttattaatttaaaatctattatgcttccaattgaagatgaaaagaattgcctagaaaagtctggaactcaaggaagaggtcagggctggagatataaatttagaagacattggaatataggtttaattaaagccagttggccagatgagatcctccatgtaaagattatagatagagaagataagagggatcaaaaccaagccttggggaattccagtattaagagttgccagagaaagaaaccaacaaagacagaaaaagcaatcagtacggtgggaagaaaccaagagggcctgatgtcataaaggcatttcaggctagagaaagtgtttaattaaagagaagaaagaagaacttccattgcatttggcaatggaggtcacatttgtgatctggacaggatagttgcagagagtaatgagtttaagttgtacatcaaagtaaaagacacacactctggccaaaggaacagccacagaaggctggcatatgatgtgcctggcacgcaagttttggttttgtcctttggattctcctgttagatatatgtggctgttaaacaaggtctcagaaataacggcttggtaatggatgattctgacaggatacaagaaatcccagagtgttaagctcatcaggtttattgttagttcttgtttcctggaagtgtttgaagccttgactctattaggtgaaatatgactccattaaattgtctgacattttaatactttaatttagtgccagggaccacttttagtgtaaaatgtttcacagagggttctattttaaactgcctggcttttgtaactctcagttttttcttccaagcctttcaccagtgtaaccatcccaaatttgcatcttgtctgatgctaactgaggaagaagggcacctggagtttgaccagcaggaacaaaacatgttaaaattgttgcagaagatgatgaggtaaaaacacatagcactggggcacaaaaccctggagcctggagcctgttgcaggtgtttagcactgaccttccacataaccatgggtagccataggacctctttaaccctcagttttcacatttgtaaaggcagtgagcaggaattgcattttaaatatacaattgttgtcactggtagcatctatctggggccagtggcacaggagtaaagagaatttacccagacagttgtgaggaaagaaagccatattgattagagaaagcatgaaaatacgttgcaagggtgcaatgggcaaatcagcaagataggagctgactgcaaggagacaaaggcttgctggggattttatgggatggcgcttgtgctggggagggctatgtgctttactgataatgccaaagttgtagtaagctaacttgcagttttctattgtctgagggtctgatagtaagttgggcatgagaagattgttagtaatttgcacagaagggctatgtgtcctggaccatgaagaaaggcagacttgtagcttatctgctttttctttttggtttctcctgctcccaacaacctgactccttttctctaattaggacttcacaagtgtggcatctcatgtattctaaagtatatggtgaccatctaaggaagttggtttgaatgtgcaggtctagcaaagaacatgccctggatataaaacctaggaatcaccatctgatcgaagatggagatgaatgacttcaccctagggcaagaaggacttaagaagaataggaaggatggcaggaatggaggaaaacattttggatggaaagatgagacactgaaacaatttgaagattggaaggtgagagtctgaggtccaaagctttacaccagttgttgaagaaccttgatcacaggccagccaggacctcaaaggctcaagagaaatgatgacaaggtttgcttggcttatttagagctgggctatagagcgggaagattgtggttaaatcttagcagaactgataaaaagcatgaagttgtactgagagatttttcaactgtacatagttgcagaaagaaacaacctgctaccatagtaaatatttgtgttagaactcagtggatgaaggtggaggggggaacatggactggaggggctaacagagtatatgtagtaggcaagtgggattggagtacaagggaaggatagctgggggtgacgaggttgagtctgtgaatgagaagggcttaggtcaatttctctttctacccttcttccagctcttctcctccctctttattcctcccctcttccccttccccctcttttcctccttccctctgcctcctctcttcttcctcctttctgcctttactttatcctttaaagtcttaaaaaacaaaacaaaacaaaacaaaacaaaaactgtgatgatagaacccaaagtgtactgagagatttcttaactgtgggcaggattgttaagtggtagtaaactcaagacaacatttatattgcactttacaatacataaagcactttcacgtaattaactcctttgatttgatcatcacaacaatgcctgaggctaatagttataaaccttgttactgatgaagaagctgaaattcttatcagttaaatgtgttgctttgggcttagtaattggcagagcaagccaagtctgtctccagaccccgtggtcttctggttccaaattccatgctcttctcattatacagcacaatactttttttttttataaaatgggaaagtctttttttttaatgtatttacagacagttcatggctttagacacacacacaataaagccatttttattaaatataagaaagtggagcaaatttgcgtccttttttattttctaatgacaatgctaaaagctaaaaggcaattggccattgacgggagaacaaaggaacctgaataattgataaaatgtattctaaatccagaaactgtcaaagtaggcgatgtcagagatgctgcagttgcttggttgttcgtgatatctgatgacgctgcatctcagtcataaaaacttcagggaatctgaaagaaataataatgcgccatggtattttgagcttatcaccacaagaaatactctgtaattgcatcaaatgattataaatggcatattttagggacataataagcaatgcaaaggacaggtctgcttattagtgccaaaatttgtatttattcccatattgctttttttttcctaggcattttccggcatctcatttctgactattaaattataccccaaatagaatatgtaactacatgtaaccaacctattttggtctacattaagtgcagcagcataaatagaaactgaaaataatcagaagcatttagaatttcgtttttattcatctgatttacttggccttttgtctgggatgtaagtgattctgagcccctctccagactcacactttccccaggtttcagtacctggggctcacaatctcagtggaagagtttcaaggcaatcttccactcaggactccttatgccttgcatgcacacaaagcagcgttgctcaaaacataggaaacaactatgaggaataaaaaggaaaagcttgttccttaaagaacgagaaggaggccagcagtctttttcataccttcttgtttatagaaagcagatttttttttttttttttttttagtaaaagcatatttggagcaggaaagaaatatgacctagactgtgttgttttcttttattgtatctacaaatagtttagctgaagtgagcttttcagttattgattttaaatcataagtttaattcgtcatcaaggcaacaacaaatgtgatgtttggggcagatgcaaagttgaagtatgtctaaagaaatagcacgctagttgcgtttaatgtggaaggtaaattataacaaaacaaactaaaaccccacaaactctaaagattttcccttatagttatagaaattaggaaatgccctattgtgcatctttccttcccaactgtaccgagattttgaattttttataatttgtactaatatgtaactagaccagatataatctgttgaggctttcttgtgatggaaagcaggtgaaatcaattttcagttgaaatatgcttttcagttcactatatgatgtttgtagggcttttttagagaagggctttgcatttagacttgagcagtttagcaggcttcgtcggagggtaaatctggctgctggatctagttggaatgttttcctttcataagaagagttggagataaagtgattcttgctttcaaatacacttttaacaatacaaaagaataattgaagactttttcttttgagacagagtctcactctgttgcccaggatggaatgcagcggaacaatttcgactcattgtagcctcgacctctcaggctcaggtgatcctcctacctcagcctcccaagtagctgggactacaggcgtgtgccaccacatctggctaatttttgtatgttttgtagagttggggttttgctatgttgcccaggctggtcttgaactcctgggctcaagctttcctccctccttggcatcccagagtgctgggattacaggtgtaagccactgatcccagcctaattgaagacttttgtatgttaggtgctaagtaatacaaaagtaaaagtgccactgtttctgtcctcaaggaatttacagtctggagaaggagacaaaatataaacaaacacactgataagtaaatgattacaaattgtgccaagtgccatgatagaaaagaattgatgtgcattatctctgtgctccctgttaggggcacctgacccatcaggaaggccattgatcatacccatcagtcttccaggtataccaaggacattggattgaatgtcacaggacctggattcaagccctgccatcgaatccagctgggtgtttctgggcttcagtttctgtatattcagtaatagtatcgaatattagtgggagtaatagcattgaatgccctccatgctcactggaacttcatccacaattacaatgtcttggtggctttctaagtttttttttaatttttaatttctaatttttgtaggtacacagtaggtgtctatatttatggggtatgtgagatattttgataaaggcatgcaatgcataataatcacatcatggaaaatggggtatccatctcctcaagcatttatcctttgtgttacaaacaattcaattatgttttttaagttattttaaaatgtacaaatacattattttggctatagtcacactgtcatgctattaaatgctaggtcttctaattattttttgtaccctttaaccatctctacctctccctgatcccccagtacccttcctatcctctggtaaccatccttccattctctatctccatgggttcagttgttttgatttttacattcagtaaatgagtaagaatacacaatgtttgtctttctgttcctggcttatttcacttaacatgatgaccacagttccatccatattgttgcaaataacaggatctcattgttttcatgaataaatagtactccattgtttatatgtaccacaatttctttgtccattcatgtgttgatggatacttaggttgcttccaaatattggctattgtgaacagtgctgcaacaaacatggatgtgcaggtatctctttgacatgctgatttcctttcttttgggaatatacccagcagtgggattgctggatcatatggtagctctgtatttagttttttggggaaatcccaaactgctcttcattgtggttgtactcatttacattcctagtggctttctagaacctcctcttggggagccatatggaaattttgctgaaggtgagaatatggcagcttgatgcaatgcagtgttttttcaagcttcttaatttgttgttgttttgagacctaagtctcaggagagatgcaccgaggctgctgcagagctgtagagaggagatgaggagcgagcaaaggaggtagggttggaggcgcagggcatctcccaccctgacttgtctcagacatgcccctcctttatctgttgattataccaggcttacagggaggattttatccaaagaattcacctgctaaaagaggaaaacattttaaaattactgttgtagtccaaatagtctctggaactagacgattctggattccaaatatagacatgtggtgcttaacgacagggatactttgataaatgcattattagactattttgtacttgtgtgaacatcacagagtgcacttacatgaaccctgatggcaaaacatactacagacatactacatactaggcttatgtggtctagcctcttactcctaggctacaaatctgtacggcatgttactgtacttaatactgtaggcaattgttaatacagtggtatttgtttatctaaactatcaaaacctagaaaaggcacagtaaaatatggtataaaagattttatttaaagtacacctatataaggcacttcccatgaatggagcttgcaggactgcgtgttgctctgggtgggtcagtgagtgagtggtgagagagtgtgaaggcctaagacattactgtacactactgtagactttataaacactatatttaggctacctatatttatagaaaaatcttctttcttcaataataaattaatgttagcttactgtaactttctgacttaataaatgttttaatttttcaaaactttttgactctttttcaataatagcttgaaatacaaacacattgtacagctgtataaaaataatttctttttatcctcattctacaaacttttttgaatttttaaattttttaatataatttttaaaattttgttaaaaacaaagacacaaacacacacattagcctaggcccacacagggtcaggattgtcagtatcactgtcttccacctccacatcttgtcctactggaaggtcttcagggtaaataacaagcacgaagctgtcatctcctataacaatgccttcttctggaattcctcctgaaggacctgcctgaggctgtttcacagttaactttttttttttttaataaaaaatacatgtagaagcagtacactctaaaataacaataaaagtgcagtatagtaaatacataagcgaataacagtttttctaatcattatcaggtaatatgtactccatataattgcatgtgctagactcatacaagtggtagtgcagtaggtatgtttacgctagcatcaccgcagacacatgagtaatactgtgacattatgagggctatgatgtcactaagtgatagaaattttttagctctgttataaccttataggtccacatcatataggcaatccatcagtgaccaaaatgtcattatgtagagcatgactgtattagttcgttttcacgctgctgataaagatatacctgacactgggcaatttacaaaagaaagaggcttaatggactcacagttccgcatggctagagaggcctcacaatcatggcagaaggtggaaggcacctctcacatggcagcagacaagagaagagaacttgtgcagggaaactcccctttatgaaaccatcagatctcgtgagacttactcactatcacaagaatagcatggcaaagacccgccaccatgattcaattacctcccaccaggtgtctcccacaacacatgggaattgtgggagctacaattcaagatgagatttgggtggggacacagctaaaccatatcagtgactacagtactatagcagttgaatagttttttttaaatcccttgagtatcttatgatctataaaatggcagtcaagcctatcctgtggatatttgcaaggcttataaatattgtctggaagagaaagatgacttaggagtatattataactcttgatgtttttattatatttgtcattaatgtgcacaaattataaatgtattatcattaataataatttatttaaaaaagtgatgggatatcataaaacccttgggtgaattcaaacatggccactttgtatgacaaattacatgcttctatttctgttccacccagggtttcttttgagcagtggaaattcatctggaaacttaatgttatcccactatagagagccattcttgatgtgccactaattctgccaaataggctgacttgactactctcttaggatacagaattatatgaagaaaaatagagttgagaaggaaaaagtacaaacgttgtgtgtgcatataacaaacagatgactgctttagacatatttggtctgtaaacacctgtggaatcttgcctgtgtctctaatttttccagattttgctcatgggagagacacaatttgttctttgaatgtagccattatattttaacatacatgctgatttaatcatgctggtcaaaattttctttttatagcatccagacagcttgtgcatataactacatgcagttttattttgtggccaactggcaaccatatggaagtcagttaaaatgtattttgattatatgactctgtgcacataggcacatcatctcaggaaggctcaggtagcatagaggcaagtgaattcagcctgagattacagtaaagacatgaatctgatagtctggcatttctggactcacactgatttcttgaagaaaagcccatacagttggaatcagtgccttaaattaggtttcttaatatgatgagctcataaaatatgtgttgtcctgccttcttcagatgtgagagttgatgttacagagatctctttggtaatatgactattttaataaaatattcacaattaaaaatatatagaagaaagcagcaaggaaagactagaactaatgattagagttgttgaaaatgcatacataatttactccctttttaaaaaaaatggaactgggctattctgttgtacatagacttttgtcaaaatcaaattaagaatactttactcagttttctttttcttcctttattcatctctgtaaatatgattttaaaggcccttgaaaacaaaataattatcttattaaaatttagttacatgttgtgtttaaaatgctaaagttttggccagccgcagtggctcacgcctgtaatcccagtactttgcccgagatgggcagatcatgaggtcaggagttcaagaccagcctgaccaacatggtgaaaccctgtctctactaaaaatacaacaacaacaacaacaacaacaaattagccaggagtggtggtgcgtgcctgtaatcccagctactcaggaggctgaggcaggagtatcgcttgaacccaggaggcggaggtcgcagtgagccgagattgcgcaacagagtgtgactcagtcttaaaagaaaaaaaaaaattctgaaatttatcggagaaaacaattgggatctatttttagtctcaaatgtaggcatatacaaaaataatacatagtagttttctaagtactattagacatttgtttcccattttgccatttgctttcagtttacctgacatgaagataaaaatgatagctatttctcacttggcatttgaaagacaagagcaataagaaacccagcaaaactcctagagaattttcatggggaaaataagcatattgacattctttgacttttgtaaattgattttttggctccagctgctctaaagccattaagagttagagttaatcattcttgatttttttattgttagtcagttcccttattcataacactgaataatagcaatactactgagttttatttgtgttcacattcagtgctatgttaaaaaattcacaaagtaacatactgaaattcttgcaggtaactggtaaaatatgtagtctttagtagactgttgattgatattctagtaaaagagtaaatcttgtgaatttcagaggtggtcccaagatggtcttaaccctactgtgttaaaaaatatcagcatctttttcctataaagacaacctgaaggctcttttgaaatatgtataagtgcttctttttaaaaaacttattgatcaaatcagcttaattagctatgaaaggaatgatccttcacccctatgttaatgtctgtttacactgtgagtttgtaaaagcttctgatagagattgatgccatatctaataaattatcccactatatattcataaagtactatgattatatctatatgaatatatatataggtgaatgtagattcatatcaaaaattgaaacccagagaaaaaacttggaatttggtaggcagaaccatgaccctcctcaaagaagtcctcaccctcatccccgaaacctgtcagtatgctctgtaacatgattaagggcaattaacattgcaggtagaattaaagttactattttagtccatttgtgctgctataacaaaatgcctgagactgggtatgtataaagaacagaaatttgttttctgttctggagcctaggaagtccaagatcaaagtgccagcaggttccatcatctggtgagtactgcatcttcagaggggaggggaaaggaacagtatgttctcacctggcagaagaacaaaagagcaagctaccaaacactgccaagcctcttttatagaggccttaatcgcattcgtgagggagcagccctcatggcctaattacctcttaaaggctctatctcttaaaactactaggttggcaacacctgaatttaagagggggcataatcaaaccatattattactaatcagttgaccttaaaatagataatcctggatgatctcggtgggccccttgtaattacaagtttccttaaaagtggaagagggtgacacaagagaagtgagagtgacgtaatgcgaacaggactcaacacaccattgctgactttgaagaaggaggcctgaatttcaatagccacggaaggggacaacctttagaagctggaaatggcaaataatactacccaaaagccctcagaaaggagttcaaccctgacagtacctttattttagctctgtgcaacctgtttcagactgctgcagaaccgtaagataataaattcatgttgttttaaggcactacatttgtaataatttgtcaaggcagcaataaaaaaccaatgcagcaaaagacaataacgtctgtttaaccacacagtcacggaacatctattaactagcaacttattaaatacagcttactgctgcaacatctttggtgtaattaaaacatcctccatgaatcagagtgagaattatacttaagtgtctgccaattgccatgataatagaaaagcttatgatctctctactaagtaccttaggaagacaagggcccaatgatatgagcagtgtggtggaaccccaaacatcttcccactttcatgcacacatatcattcattctcctttttcccaaggttcgctgttagtatagaggcacaatagatcatgattagctctgggcatgttcacagtttagctgcctgagcagattaatttgagagtccaggaaaagcttattaaacagattatgagaactagacaagacttttgagaccatctgtccaaaactttggttttaccagtaagcaaattcagacccagcatcactcagctggtaggtggtaaaactgagaagagaatccatgtattttgttttttcctagttctgtgttgttgcactgcataatgaattccagccagaaccacacattcagttcctgactagtccacaattagaatcaccatcaagtcaaacacaagtgaggcattacatccaggaggtcatagttagttgtgtgtgtgttccctagatagattccctgaagctttctcatcaacaccaagaagctgaaggggaaaatgaaagttccccttcagttcccctcaattcaagagtaattgagaccaacatcattcatggatattaataatatgaccttttttaaagaatcaccaaatcattacatcataaagaacaatgatcttatattttactaggtttattagttgcagtctcagcctctaggttgctagaaagctctgggctcctttggatatggacatggccaaatctctttaactttctagttatggcactttaggcaaattcaacttctctgagtctaggttttctcctctgttcaatggaactgacaattctatgtcagagagctattgtaaggattaaaggaactaatatttgcaaaccccatactgttgcttggaataaaacaggtgctgaataaatggtagctatttgattgttagttttaaaaaatcttgctagaaatcattaagagtgtatttatctaagtgggggaaaagaaaaacctaagtaagacccttggatcttgaaagaaagaaaaagagagaaatgattgtcaacacaaacagaaatgcttgaggaacttcaagggctcaagagtcaaaggacaggctagaaaaaaatgtcagagaagaaagagctaagagaagaaagtcaaaggaaaggagagaaggggagaatggaaggagaactgagaaaccagcagtgtttttttaaaggtgataactgaagaaggtgagcagaggaagaaagaacacagtgagtaattgaaatcaccagttattttcttctgattcatctcttaaaggaaataccttctaagagagatctttgctcttttgtgtgctggtgaatgtaaggtgagaatctctcctttctttttctaatgatgaccctgaacaaggccgtgctcttcttttaaacatctcttctgtttgaagctctgttacaatagaatcaaatagggtctccttggtttatgtcactgatctaaggttgaatgatgtacttgacagatccttttgaactgccccatctgggaactgaaccaaagactggatcgccagtcatggtactcacaattacctttccctttccgcacagtccccacattcactacccgaaagtataaaatccatctcataagatgcagatgaagtagaatgatgcggtttcccaaacttgcctgattatacaaaagcccagaagcattgctgtctggagattcggattcttacctcaaggtgattcttatcattagaaagtgaaaggtacagaaatgaagaaactttcgagtaagcaacgtttcctaccaagggactgggtggttctgaatataacaccatctttctcctaacaatagaaggtgacattttgacaaataagcttaggattcgtattcttccctaaggtatcattttgctgagctatcattttttttctttctttttatttttgagacagagtctcactctgtcacccaggctggagtgccgcggtgtgctcttggctcactgcaacctctgcctcccgggttcaagcaattttcgttcctcagcttccagagttgctgggattacaggggcccgccagagtttctggctaatttttgtatttttagtagagacggggtttcactatgttggccaggctggtctcaaactcctgacctcaagtgatgagcttaccttggcctcccaaagtgctgggattacaggcatgagccactgctcccggacttgctgtaagctatctttttgccactcatgatgatgattgtatggatgactctctggtctgtgttgtcagtattcaagtggtacctccactctgtcacatcttcattttgcttgtctagcagacttgctagtcccttctgtcttgttccatgtcaggcttggacatatgaattgcaatcacattgtgagacaattaattgtccaatatttctcaagactccctgtcctttagaaactattttgcattcatctttgagtcctcagtattttgcctagtaaacagggtttgtcaagtgaatatccaatatagactcaggaagatccacatggggagtgagaaaattgagcgaatcccaggaaaagaacaggaaatggaggtaaaagactcacgtaagtttacccttctatccaggcatgcctccagacaccagcttccacttccttatctgtctggaattggtgttgaattgatcttcgaggtcagtttgaggtttcttactctctatatgagtctctgatacttagaatgttattttgtgctcagattgccagaaatcatgaagaaatgaaaggggaaaaatggtggcaataatgatgactaacaatgttttattgtgtgacatgaagttaaacagtaataatttattgttatattgaatgctgcagcattaaactgctgcctccagtgttaaaagcaatgctcacaagacagatcttatgagaaactctatgtaacagcaaaggatcactgaaatattcagatacagaatttacaatagttgcattagggcttcctttgaattaattaatatttcctctgagatgactcctgccaagtggttttgcttcattcctgatttaattgctaggaaaatcagaattattccagaaagtgaggctatgaaggtttcattgtaggaaaatcttgtgtctgaagccgtgaggctggacaaagggaaatgagttgaatgctgttgtgaatgggcagaagtcagcaccagcaacttccattcatttcgaagtaagagttgataagagaattgactgttgaagtcaaatctccgtatattttcttatttccttctttgcatccatcttgcaaagcaaatttttaagagaaaacgagtgtttcattcttgatagtgaattgctctgcttcttcagcaggaggtgcaggagaaatcctatttgcatcctttccactgctcttaacaagcccctaaaggctgagttaatgtttatttgtggcctggagtggccaaaagggaatagcaggaattattttcttcatagaagtggtggagaatatgagtgcctccctctataaactggagaagatttacctgcacaattctcctctctgctttttagtactgcttgggggatgaaagggacccatggactttggcctcagacacaccaggctggtttcaaattttccttttttctgaaatccacagtaagccacttaaactctctaagccacagtattctgttctgtacaattggaataacaatgctgtgtactggaacagcttcataatttgtaggcccagtactaaatgaaaattgggacccttttgttcaaagaacatgaacttcaagacagtaatggcagagcatcaaataggtgtgtggcccttctgagcatgggggctgtaccactgggcaggccacataccacgaagttgacctcactgtgcagctggattggctgttggatgtcagatatctttccctttgtatctctgtatctcagagagtggatccctgaaaatggcatttgcactggctgctagctagatttagccatggaaggcagtagtaggagactgatggtgagaggcacggggaagccaagttatttccctcttttctcctttcccctgtctctatttccctttgaaacgtatctccaatagtaactgctctcctctttcagttccagcatacctaggacagcccaccttctggggtcccacctttcctgatcccactcactgctagtcagttctctgcaggcagcccagctcctcatgctctaaaaccaccatttccttggttcctccagcctgacaggtgctagctgcttcctgatataactaatatcttgactacctccctgttccctatgaggcatttcagctcttccaagcctctttaactagttccccttattaactattctttattcttcatagaatctgatataagtgtctaccttgaaaggttattacaaggaacaaatttgtctaaggcagtggttttaactgtacattgcaattcatttgtgagtaatacaatcagtttgatgggtcaagaccggtagtttagaacacaaaataacttagagcagaataagaaaacatggtagtgcattgtatgtattaaggtacatatgatttaataaagcttttagttgtctctgtgtgtatgtgtgatgtgtaccatttcatgctgtaaaaatgtattactttctagcaggtgggagaaggaaagaaaggccaatggtctaagacttctggtacataattagcactcaataaattgtagaaactattgttgccatccaagaccatgccatttaaacaaaaggcagtcagacagcccaaagagtttaccattccaactcactttagctcattagaatagtttcatgtagttgggccaacttgtactaaaatggccaaagcgtttacttacatttgtttgtttacacctagacaggcccagcttgagtcaccagccttggctgaaagagaagccagccaggttcaaagtaaagaaacagttttaaaataacattttatttttctgtgagtcatagcaaatctgtccctgcaacatctttctcctgcagctaaatgctttaaaatggtcaggtctcacccaggaaagtgggactgggaggaagtgatgcgataaaacagcttcccaatcagtgcattagtaggagtgcaacctctggcattcctcttttttcagaagtatcaaaaagctctgcagagataactgtgtctccagatggccatgagattggtaaatgacaaatgtttatcagcctttcagcacctgctgatggaagaactaaaaaaaaaatcgcaagtgactttatgagcccacagccaccccagctgtaatgggtgctagtagctctgtgttgctgacctcacatgggtaaaggaagagcagaagaatttttagtcccttggctacttcttatctatttcatcaggtaaggaaactcaacttgaatcctttcaactctgaagaatggtagatctgaggaacaacaaagagctataggtcatgtggatttctctgctcagtcagagagcccagaactctccctggagctgaagatagcccttgcaagctatctcatgatggttttatagcacagtgggctcactcatactggtgctggttttgagcatctatgttgacaagacaaatgtctgtttctactactgcagaggatagagtttaaccaaagtcaggtgacagagaaaaagaacagaaactgataacacttacacagtatccttatatagcaggctcttgaataatgcaggcattggggtgacaaccacccttacagtcaaaaatctgtttataacttttttttttttcagatggagtcttgctctgttgcccaggctggagtgcagtggcatgatcttcgctcactgcaacctttgcctcccgggttaaagagattctcctgcctcagcctcccaagtagctggaattacaggcatataccaccatgcctggctaaattttgtatttttagcagagatggagtttcatcacgttggccaggctgatctcaaactcctgacttcaggtgatccacccgcctcagcctccccagctgtgtagataacttttgacgccccacagccttaactattaatagcctatcattgactagaaatcttactgataacagtcttttaatgcatatgttatatatatacattacactatattattacaataaagttggaaaataaaatgttattaagaaaatcacaaaaaaagagaaaatatatttactattcattaagaagtggaaattgatcatcataaagtcttcctcgttgtcattgtcttcaggttgagtagctgaggaggaggaggaagggaatgggttagtcttgctgtctcaaggatggcaaaggcagaaggaaatccgcatgtaagtggacccacgcagttcaaacctgtgttgttcaagggtactttatgttgtccgggatgctatattgagtactttatacatataaatttacttaatcctcacaacatgcctacaaggtggatactactattgtcctcatttccagctgagaaaacagatagagaaggcaaataatgtgctcaaatctgcacagttaattaatcatagagcccaaattcaaacaaaatagtgtggctgccaagtcaatgctcttgacctctacccagactgggagccagagggtttgcattctaattttatcattaaccaatctgactgatggggcaaatcaaccctactgcaatctcctcttttcatctgtaatataaggttattgcttgagatattttcaagtcttagtgccacctcccatttagagctttagtgttgagaaagatgatattaatgtattccgttgtcctaaatatttcaaacacgtcagtttctacttttccagacaactccaatggggatatttttttattcctccacttcctaattaaggctgaaagggccccatattcagctgctgagtctctgtctcccgccttcttttcctcctgtacgacctaaaactgtcttttgtctttcagcacttggggagaaactctgggaagctttctaaatccctaaatttgtcacacccatccttaaagcagtgctgaattaaaaagtgggattcgtctaagcagaggagatacttaaggaaggagaggggctacagcactaaatgatgtttccaattaagagaagtgtaaggtcagagagaaactccctcctggatggagctcttcaccacctgatgagctgattaaatatcatgccgcaaaaagtaaatgtttactccaagccaggtgcttggactctaaagaactctattaggcaagagtaagtggtttaattggctcaccttcattcaactgttagtatgttcctcataagtgcctgtcagagagaatcttttgtgtttcccttctaacagctggctcataaaaacataaactcatcttacaatgttaagtaaggatcttttaattcctgttttctttcctccaatttgtattaatatgataggagagaaagaaagtgaaagcatgcttctatagctggctacttcatcaaacttaatggaaccatattttgtaattcattctataatttaagttttggtcattttatctcttaaagatgaattccaggccaggtgcagtggtttgtgcctgtaatctcaacccttgagaagccgaggtaggatgattgttagagcccaggagtttgaaaccaaccaatatagagaccctgtctctacaaaaaaaaaaaaaaaaaaaaaaaagtcaggtgtgatggtatatgcctgtagtcctagctactcaggaggctgaagtgggaggattgcttgagcccaggaggtccaggttgcagagagccatgatgatgccattgcactccagcctaggcaacagagcgagacactgtctcaaaagacacacaaacaaaaaaatatgaaaccctagctaaacactgtggactcaaaataacctgtgaaatcacccaaccgtagtatttatctatgagaatgtttcaaagggagatatgtagttgtatgactatttcacgcagatatttgttattaataaaagactttgtggtcagcatgacgtgttagctacagttgaatccatgcttctttacattttgtggtttggttgttgtcgaatttactttccatgcattatttccaaatatatacttattatttcatcagcttagaatggtttggatagaaaaatatatcaaggtctcagaaatgccccccattaacataagggtagccatgacttgaacccaccccactggtttcctttgtctttctccatttctgattctctttctctgtggttacctaggatatataaattacttgactttgaaattcatgattaactcagaaagttatagctagtgattcacaatatttgttttaaaaacagtatgaagaatgtagaagcttggtttttaattataataatataaattagtatcattttatgtactcaaatgccacacacatatgtataaggcattcctatggaataatcttaacctggttctttgacaatttttgtaattcattctctagtgaaatatttccccaaagtgtatccacagattactatctcaccaatatgcttccggaaaaaaagtgccatggtctaataagtttaggaaaccttgcacattctttttccttgggatcaatcattagtattagcagatttagcactaagaaatcctgtagtagagaaattcatttacttttaattcagtatttctcaaaatcattttaccctattactcaaatccctgcttttattctgggaattgttacctctcctttcctttgcatacacttgagaaattgactctagaaatactagccttatgaaatattgatagtaattgctatggtttgttagactcctccaaatctcttgttgaactttgatccctagcattggaggtgggcttaatgggaggtgtttgggtcatgagggcagatccttcatgaatacattaatgccctccctggggtgggtaggaactgagtgacttgttgctctattagtttctgtgagagttgtcccccgactcgccgcagagctggttgttaaaaagagcctggttcctcttccccctctctctcttgcttcctctctctccatgtgatctctgcacacaccagctccccttcaccttctaccatgagtgcaaacagcctgaggccctcacagatgcagatgccagatcattgcttcttacacattgtgtagaaccatgagccaaataaacgtcttttctttataagtaactgagcctcaggtattcttttatagcaatacaaatggacgaagacagtactgattatttgttgggcatttcctatgtgcgaggaactgttacaggtattttggcagttgtaatagcgaggtatttattttggtgctttaacagagactaaaatggctgctttaaataagattgattatttctctctcacatgaaagcctaaaatggtgagcagtgtagcaacttagggcagcaatctttgggtcatccaaggcatcagataccttctgtggtgttgtttcaccgtcctttgaagtgttcctttcttcataggttgaaaccagctccttgtacctcatctggtcccatccctaagaaaagagaccaaagagccatccttgagaaaagagaccaaagagacatccctgagaaaagagaaaataaagggcaaacagcttcttgttaagaatctggtctggattatgctcatagctcattgtccaactgaataaattgctcaatttattgagctcataaattgctcaatatgacatggccatacccagcttacaaggaagtccaagaaatagtctcttattggggaacatttgctctcctgaaacatagaaggttctattatttaataggtagaaggaaagaatgagtattacaaggcaattagctttctctgctgtgtttttacctcattaaatcctacctacaacccatgaaatcagtactttgtcttcattttaatatgagaaaactaagatacagagaaagtaaaactaaagtcacgtagcgactattcgcttttggttttgataccatgctacctaattccatagcctgggttcttagctgatacacacagttgcaatgcctttccagaaaatttctagtagtttccaccattcctggacctattcttttctaactttaaaggcaatccatcttctaagtcagtgtggcagagactctagtttcttcacccaaaccatgttctcctgtctttcttgggctcatgtttaaactatatttctcatcttctcttaggtattaccatatgactaaggtctagtaaatgcaatgtgagaagatctgttgtataccacctccaggcttggcctgtaaaaacttcccatggacatgagctcctccatgccctttcccctccagctagatgaattggaaatgacacccaggacaactggaaggccatatgtcaaaatggacaaggcttgctcaccctgaattctagaataattttgtggaggagaactaccctaacaatctgttttcccacctagcaaaaaaaaatgtgaccacaaaaataaacttctgctgtgtttgatccatttgaaagtttttgatctattagttctagcagttagcttcctctaaaaaatacaattgattaccatgatgtcatggataacaagttggcaacctgggtcaaagtcctattcttgtttttttctagtgataagaccttgggcaatttattaaatctctccaagtctcagttttctcagctttaaaataatcttcaatcatagtgttgttctaagaagtaaattagtttatcttaaaaatcctattccctgttaattattccattctagcaatcaatttgtgcttattctagttgtcccactgtttaaaacacacatgccttagtattatgaaaacatttcaaaagaaatatgtcttagatttctacatttatattagaaaactttcaaatttatacttcatgccttttaaaaaaataatactagtaaaatgaaagaatatcagttttggaatcattccacagtcctggataaaaatacctgttagaccacttactagtggtatcatctatgtgagactcaaattcagcatcagtaattttggaagaatggtagtcctactttcagaattgttaggattaaataaagtgctaaaagtctgtgaaatctccttgcacactgatgatttcccttctctccccaaatagatttccatatggagcacttttagtcatttttgctggactgcaatcacctttctttcttcaaatgttaaaactgaacagtagtagctagcaatttggaatctctagaaagaagttttttttattattatagtgctgaagctcagctcattctctcaaggagcctatggatttggagtgcatcataagggaagaagttaacctcctgctgtattaccagagaccaaggacaaatgttggttgtcacctgcctaaccaggcaagtgatagtcacagactgtccatctcacaacaaaacaatgctaattttgttgagggatagaaatgttgtagttgatctcattttctctagcacagtgtccctttttgaatgttccttctcaaatagggcatggtataaactctgcaagaggggagttccatttggaagacatgtaggcaaacaacattcaggctccacacccacttcgcctgctgagatttgacttattacacaactgcagatgctggtcaattagtttctcatactcattcgtatcacagaagggatgcagtggttataaattgcactgattatgcacaccttggcttaccctattgttgcataaaaataggcaaggcatgttagtcattgcatagtcttttcagtagaaaggaaaagtgattgagaaacagcaaggaaaattgtgtttacagctaaggtttttgttttgttttgttttgtttccactccgttcagtgtgtatataaagttaatgcatttttaacttaacagcaaccaacaacagcttcactttgagtgcatgaaaaacactggggcttaagtgttgatttgttgccaggcatttcctttgggaatccatgtaggctgatcatttacctgggaaatcgtgtgtgtgtgtgtgtgtgtgtgtgttacctttacctttgtaagggacatcataaaacctcaatttcctggtgtgttccagttaattttctgctttattgaatgtcactctgaattccctatttcctttaacttttgtgttgaaaaatcattcaaaagactactgagccattttcttcttcattaagaaaaatattgggttagacttaattcttgatagctgaaaattttggagcattgttttgtttgtttgttttacatttttgaaacaaactattttgagaccgtaataagaacaatggataatcttcccagaaatcagagagagaaagagagagaattctgcataaatttatagatccttgcagcccacatttgaggccccagcaatagaccccaggttaagaattcctgccatagagtgttttgacattatcattctaaatatttaattttgtccaaataaaaatatagacagagaaaagggaacttagcaaaaatcttcatttacattcaaaacaattcaaggtgcattaaaatcatgaaaaactttgttcctctataggccagggaagtttcttgctacttatttcctttattaaagtatattttattgatttgtctttttcttttaaaaacagaatatccaatgggtaagactgaccaaagatttggggaagttgattctaaataggtgagctgtgttttaagagttcttcttagtactcttcaactcagcatgtggaaataaatttcaaaagcttttcttaatttcacaaaaacaaatataaatagttatggggggaaataaacaacaggccaaataccagatggcaactcaaagcacattgtctgctctcttgctctaagctactggttctcagtaggggtgggacagctcccaaaagggggtctttgggaatttgtggtgggtttttggtagtcacaatgttaagaggtactataatagctatttagatggcagagttaggatttcctgtttctttttctttttggtatccctcatgactatatagtctccccaatatattcacatgggtgaaaatcctattcgtaatgattgaactcaattataactccatttacagataaacatgcacaaaattttcatggttttaatacactgaattttccaagggtgtgtgaaattgctgtacatattgacagaagattgttgtttgatttggttaagaactttttattattattattattattattatactttaagttttagggtacatgtgcacaatgtgcaggttacttacatatgtatacatgtgccatgctggtgtgctgcacccattaactcgtcatttagcattaggtatatctcccaatgctatccctccccgctccccccaccccacaacagtccccagagtgtgatgttccccttcctgtgtccatgtgttctcattgttcaattcccacctgtgagtgagaacacacggtgtttggttttttgtctttgcgatagtttactgagaatgatgatttccattttcatccatgtccctacaaaggacataaggaaatgtggcacatatacaccatggaatactatgcagccgtaaaaaatgaagaacttttttaagagttatttttcactttagaaaatcagctagagaccacaatgctgtttatggtattgaagtccccatgagaatgcacctggatcagtgtacatttgtaatgatcagattcacagtgattccatgtgtaggtataagcttttctctacttcaccatgtgtccttgtatagttattgataggggttggctgtggccccctcccaaatctcatcttgaactgtagctctcataattcccatttgtcatgggagggacccaatgggaagtaattgaatcatgggagcaggtctttcccctgctgttctcatgatagtaagtctcatgagatctgatgattttataaaggggagttcccctacacaagttctctcttgcctgccaccatgtaagatgtgactttgctcctcatttgccttctgccatgaatttgaggcctccccagccatgtagaactgtgagtcaattaaacctctttcctttataaattacccagtcttgggtatgtcttcattagcagcgtgagaacagactataacagttatcctgcatcttaacatatttcaatattatttattatatacttatatataataatataaaaatattcattgtgcatttatatatcataatatatatattatgtaatttttcattctgtcttataatttattctaaaaattatatttttaagttaatttataacttattaagtcagtgtttctttaggaaatgtgccctccgtcaaaattttattctttttggtctctttgctagtatgctactagctaaagaaaattcattcccactaattctggattcttatagttattcacagccatgctgttaaagagacaagtgaattactaccttctcagagttgaactcaagggggaagtttgactattggctggcaaaataaagtagtggaaatttatttcttttgttctcaataaaataacctgtgaaccatcctaaaactaaaaaaaggaaattatttatgaagagaagttgtatcatttaaattcgttttctctcttttccctttatttcagaaaccttccataataaaaacttggatataatgaaattttgcataaatgacatgtgacaacctaatttagtggaagccagggaacctgctaatactttaacttcaaagctcttccattttattccttcattacttttcctcctttcaaagcattctttagccatgcaccaagttcgaacaatgacgaatcaaatcctcagagccaagaacaatgttctaatatttccatgcaattaattgctacttcttggtgagcatccagtatacttgattctctcatagaagattctccaagcctgacactcggttgaagtctgaggacttcactgaggacaaagagggatcaaatcttcccaacaaacagtgaactcaccatgcaaagtgaatagaatcccctaatcaataaatcactaaatatttatggagccccgaaatcatattgtgacaagatttttcaaaaaaaaatgtagaaactaagttatgatacaatcacatgtcaggaaggtatattggagtactacttgtccaggactccactgacacccccttgtgctccctatgtcattttgatgtaccaggccattcactgtatctataacgtgaatttttgcccctattttcaatgtcccccatcctattagcttttcctttccagtaaacttctccaaacccttcctcagtgtttcaaaggcaacaaaagttatcacaacaaaagtaactagtatttcttgagtgttcacagtgggctggacaagcaaagtgctttacctgcattgcctcagttaattctcttaataacctatgacatcagctctattattaacctcattatacacatgggaaaatagacactactatgggctgaatatgccccctccaaaattatgttgaaactaaatccccattttgcagtattaagaggcagggcctttttgagtggccagccttcatgagtggattagggccttatgaaggggctggagaaaactaacttaggccctttttgcctttctatcttccaacatgtgaggacatagcatttgcaccttctaccatgtgagaacacagcaagaaggccctcaccagacaccaaatgtgctggtgccttgatctttgacttcttagtctcagaactgtgagaagtaaatgtatattatttgtagttacccagtctatggtattgtgttatagcaacatgaagccagacagaaaaatttacagttttcatcacttggcagaggtcacataacaggtcgatttgattctcaagccgtctttactattatgcttacttggcttttatctctgtagactttaattgctgagttatctttccctgagtcattgctgcttcaaatctcagtctttaggaatcacttctgtaatctgctgattaattatgcatagatcataaaagttatttaatccagctgctgtccagagtcaatatcactatcctactcaaaaatctgcaacaatctaccacgaaaaatcaattctaaactccttagtctgacattaaacagcctgataatctgatccaatccagcctctctgcttctacctatcttgtttacctgtttgttgattcttattcaattgcttccttgatggaggactttcccacccactccatcactacctcttgtttctgcctgcacacatcatttccccaagtcttttgataagaaagatctcctttttacaactatttctctgctctctcctctccaacatatcttcctgacatgtgattgtatcataacttagtttctacatttttttgaaaaaccttgtcacaatatgattttggggctccataaatattttgtgatttattgagtaggggattctattcagtttgcatgtggagttcactgtttgttgggaagatgtgatccctcttttctctatgcttccatcatgacctggatatacttctagtatggccctttctaattcttcacatgcatgccttcactggactgcagactccaagacaggggccatgcagtattcatctttgtgtctttccagttactccacaacaatttattgagtgaataaagaaaatgctgagaaacgaactcaagaggttttgtagatttaataccattgctctgggtatcgcaaaagataatggctattaatgaattagtaccccacttcccaccacctcaccctgttgacatagtatgatagaatgtgtaaccacttaatctaccttaagatgctattgggcaacaacaatgtcttgactttaggggctggaaagcaaatagtatataatgtccaattgctcttgtttggggcagagagcacagatttaagaaacaaggatacaataaaatgaaatttggctgcagtacaaggttaatgtctctcctcacctcccaaagagtaccaagggatcattcattgtcacagctgttggggtttagagctctcttctcatccaaatgccagtactttccacaaaaagctcttccccagggatgccctaataagccagtgtgtcctgtataggtgagacttgccctggctgtctctatccaagtggtgacataagctcatctaaagcctttcattaatgcaaacaatgacccagcccatggtggcactgattcttgaagctgaagacttggagaaggagcctgattttccatcacactgattgttgttttcagtaagatgtttagcttttcaattttctctctgccaaatacaaattagtgtatttccaacatcccagagtcttagctgtgcattgccagcttccactgcttctccttaattaacaaacagctgtagaagagcttctcaactgacatggggggaagagctctaaggaagatatggactatgtctcatatcttcaaatcctccacagtcatctcctgttagatcaccaagaagaaatgcccagtggagacacttcagttcaatgaaaagtttatgactagttgggtttggtctccattttgtattaatgtagttgggttcagtctccaatctgtatgtatgtagtttcctatcccagagagcaggacaagaccatataagctctatttatgtttcctttgactctttagctgaaagcctaggatgtaggacaagtggctaacctgttttagaactttcttcctaggctaacattctgaacttggccttgtggattttacctcttaaactgcaccaaaaaccatggaaacaaagggcttacagcagtgttagcctaatctgagccctctataccttcctatactgtggccacagcagtaaagctacgtggtcttgcaaaagaccttccaagagaaggttggctacagaccttgcttatcacaccatgaacctgaggaggaaagaaaatactcacaaatagtttagcccctttcataaattgttggtccttaatccatttttgaaccctactctgttgggtggaatgtgtgtgtatctgcacgtgtgtgtgtgtgtgtgtgtgtgtgtgtgtttagaaattcaaaaaaaatgaggagatcttggtcttccatagagggaagactgcattatcaatagagtctttcttagcagaggatgaaggctcctgtagctcctaatcttcccatttgtgcacaaatacgtgaattctgattaggttgaaatcaggaagacactcttttgctgcttagtggccacatctagagctaacaacattatcagtgggatggtgattcatggtttaagaacataccctcgccattccagctactcgggaagctgaggtaaaaggatcgcttgagcccagagtttaaggctgtagtgtgccatggtaacacataactagccactgtactctagcctgagcaacatagttagaccccatttcttaaaaacaaaacaaaaacatccttctcctcttctcctcccccagcaattctggatggctcatctaataaagtacatatattttacctaatctagtcaaatgtaatgacacaataagattattattattctccaatccctgctctgcaacatatttggctgaacatttttggctgcaacatttttggctgaagagaatgaggtttcttcctccctgaacctgggaactaacatgaggtgttttcttccacttggtggagctgtgcacatgtgtgcttgcggagaaaaagaagagtcccagcaggccctctactccagctgttggagattgagctttccagtgcattatcctggctttatgcagtgatgccttccccctgatggcagtaaaattttaattagagggcaatgtgcattcctatataatggagtgcacacatggcaggaagttaacaggacacgtttgcagttccagtttcattgtcaaccagctgtgtgattcctggcaatttgctttattttgttgtgtcacagttcttgactaggtaaactggagagtcatctctggtctactttcctcttcagtttggtggaagtttcacgtaaaattacatgtgaaagtccttgagaattgaaacaatgggcaaatctatagcagaatgcttgttgaattctatcagctttcccaaggtgcaggctgcccatgtttagtctttctcactttccaatccattttccacactgcagccagcgtgttttttctcaatggaaatctgatcatatcaacctcttttttaaaaaaaatcctaaatatcttctccctctcacagaataaaaatcacaattccttaagaaactgtcaaagccttctcaatctgtgcctttcatctctgaccattggtatctttcttctgataggataaaagttcattgaatgttcaagccttctcttttgcttttcagagcttggccatgtggttttctctgtctgaaacaagcttcccccattcctttctaggctaactcctactcatcctccaaatttcagcacaaagtcacttacagtgggaatgcttccatggccctctattagcagcctctgatttatgctcccacaatagtcggttctgcctctggaccatgttttatcctattgtttttcctccataagagcacagtcataatctgtataactcagtgttgtaactctggcagctagcacaatctcaggttcataaaaagagctcaagaaatatttgttgaatgaccaattagatggcatattcatttcctagggctcctataactaacgctagcgtggtgccttagaacaacagaaatttatcctgtcgtacttctagagggtgggggtctgaaatcaaggtgttgtcagggctgtgcttcctctcagattctacacagaatcttcccttgcttctttggtggcgatcagtcctttgcatgctgtggcttgctgctacatcactctaatctctgcctttgttgtcatatagcattcctcctgcatgtctctctttgcacatggcattttcctcttataaggaaaccaatcacattggattagagcctatcctaatggcctcatcttaacttgattacatctgcaaagactctatttccaaataacgctacattcacagatactggaggttaggactttaacatatcttttggaggaggatacaggtcaataacagattgctaaaccaattaactaattactaattaatataaattatgggtggaaaaagcttccccagatcacgataaaaagctgtgtcgatctaatcaacgtgcttgcttaaataaggcatgtgtataatatatatgcatgcatctgtgtatatatacatatgtacacatgcattaattatgttgtgcaaaaaccccaaaggctatttatcccaaatagaaaatattgtgtcgtttgtctaaagcactttaaagacatctgcctttttcatatgtaaatttcttggatgacaagaaattactgctttgctagcttttaaaacactaaattatgataatccatcaccaaataaactataagcttctatcatttaaaaaatgtaagaactctgaggttagtagtagtttttagttgccattgaaagacggcagtttaacgtcatcgtttattcagatttccaaattaaggagatctctgtggttagacattcctttcgttatcactctccttttcttcaggcctgtcatttgtccattgatgtcttttccttccaaatgattcatgtacacattaggtcttttccctaagcctcatattatgaaaagcaaagctacatgaaaaaaagcaaatgattgctaaattatgtcctaatttctagcattcagcagtgctaaaatgaagcagagaatttcacaaaattctcagataaagtatatttttaccaactaacattgggtaaaagggactgagatagagatttatttttattattattaataactttgaaaatggtgcatttgggaaactacttactaatgttcattggaattggtggtaatactgaggtcaggatttaattccaggcattacccaaaaagtccatgtttgccttgtttcaagcctagagttcttaaaacaatccctgcaaggaaccaggcataaattatctttcagattggtgggcgtaggaatctatactgcgagctaactgtgctgaaatagacattttagaggatgtgaatgtctatctcagacaaaggagattacaggttattaaccaaggcacttttcaaatgccatccctttgggctttcttacttagagtttcagattcatttagccaaataccagccttatcccttccctaattttcctaaatatttgtggctgaatatacttttagctttaggagtgcagaagactttgagggaaagaaggcagggttgaaaaaggatgagtttcaggtcattacattgcttcaaggcagtttgcagcttgcattcatatttttaaagtctaaattagagccctttaacaccaactatcttgggcacacatgtatgtagaagcataccaccatatggcaaaaggcagagttgctaaaactataaataacaaagaggaaggttaattagcaaattaattagctgaattctatacaaggtactaacaataccttaatttccagatacatttgttatcaaaaatgtctaccttaataaagctgtggggacttactaagtgtatttgctgggcatggttcccagttatgaaatattaataccttgaaaaataaaacatgcttatgaaaatgcagttatgctctcattttcagaggaatatgtaagtgaggaataatatagaaatcctaaaacaactggaaattcagactaaaatgaagtagactgtagttttgtcattgcatgttctgctcatactaaagcacctatcctcccactttaccttctttaaactgcagggcagagagttatatttttcatcttcatgttgagtagagaatccatgaaaatctaatacccagttatcactcaagtgtgacaaatagaaaggagcttcagaataggatcttcagttctaccaaatgtctctgcctaattacatcaatatccatgttgatgagtgtacaaacctgtggctaattatattttcacttcttctaagggtaggtacactaatgtgtgatcccacagaaaagggcatgaaagtaaattaaaggtgtgtgccatgtatattaatgcctttgtggttattattgctattgtcttactcccatggatattggaggattgttgataagacacttaaatgttgataaggcacctaatgagtatcctgtgtgataggagtagtacacaatgataatcatttccttctttgtgcattagtattgacatagccactaatcaggaactgtaaactctaaacttgtatctgcagccctcttattaaaaagattcctggatttttttccctaagctagaaacagacagacaaacaaaaacaatgattaaagggcactaaaagatatatttaaaggcagaggtttttttcctatgtgtataagattcaaattaaattcctctttttggctatttggacagttttggcaattgggctgaagccactatgtttttgtcataacaggtcaaggattgcttactcatgtttgagaagcaataatgatatggcaagagagaggtaagggactacaatgggaggcttattaggaattgtgcatgcctctttcatgtgtgttgtctccaagctaaccttgtgaggtacgaattatgacttcttcctgaaggagaaaagcaagttttagattaagtgcctgacattctgatgtcataaaaagactgaaataagcaacattttagcacaacatttgaacagcccttttcttaaggataagctctttgctctacaccatactaatttccaaaaaggtgtgagattgacatatgaaacttgtacgtttatataaatgtgaatgcagcaagccagagaacagaatgttctgtagcccaggcaagaggcagaggaaatacccagtgacagatctacttggccctcgactaaaggggcgctgtaactttaaaatactaataaatatttagcttggctttttctttcctatttgctaagtcctgtcttgattctctggctaaggggtgtaagaaagtggctgtttgtgataaatagttgtgtttgtgtgtgaatgcatggaagaacacatctgagataatatagtgtttactgctttgccattagcacaatgggctgtctttacagaatatgatgtttaaatctatgcaccagtgcactttcaaatagagaattcgcttcctgttttcacttaaaactctctttttattttaattaacgaaaaagcagtttaatcatccatctttgcagctaaggaagttttacaggcttataatactgtcagattctgcggtatataaatgagaaatagacacttttggggaagaaattggccagtcttccttccttccttcctttcttcctttcttctttccttcccactcctcccccctttccccccactctctctctctttcttcctatgaagagactgttctaaaagctaggaagtttcattgatggtgtgtgatttcacaagctggattttatttcagaacacctgtcaaattcagagctgtctgaagcttctccaacatcattaccccagggctcccagttctatgcacatgtttttataatggcaggaaaaagaattcatatacgcatttgtgtgttagaatcagtggtgtgctggtgtaacaatcagctcctagagggtgaggcagggtgggtaggggatgtttagaaaaagtgggtatggagaagtccctgaattctagtttttgccaaattctgtgatgcaaatactcccaccacagccaatttcaaggttatttttcccagttacatttaatcagggccatacaagatgttacaagaaagaaaatgacaggaacccatgtggttcaactgatactcactcaggagctgagatagcatttcatttatgcaattcaaatagctattggtttggataccttagtattgtttcttccaagaaatattttcattctttcctaaagggataataatagacattcatgacctaatttaggagataatcattttttattttatcactcattattaatgcttcatacgaaaactagatttatgaaaaggcccatggattttacatctattatatcatctcctgttggtttgagaatgaaatgtttgttttgctaatatgtttttctgattaagaagtggaggcagcaggctattaaaagtttttctcaaggcagtaaattggtagactagatatcttcaaattaaaaagtagtgatttcttaggcctgttcatagattattcaaaaatgggttaaagcacaggttgaaaatacttttatgggccacaggataatttaagtgattatttttcagccacttttttttggaaaacatatattagctaatgtctgtaactttattaacttaaaaacaaaagtccagataaaagaattttacactctgccaagcagtggtgcccagcttataggtggttggttctgcatcttacattttgttacttgtaaggtctatgaagaaaggactcccttttctgccctgctcactgtcaaaatttcagtctctacagcatgaagactctacatatagaagacactaaaattttttttaaatatatgaatgaagcagttaatttaaggcagcaaagtcacgcctatacattatttctgtaatgtttaattttaagtataattgcttattaagtagataggatgcttagaaactatatttacctggaagtggcttaaaaatttccctatagacaaaaaatataatttgaagtagttcgtcttcaaaataaaggcctccagatggccagatacctttcatgtacatgcatcaattagactgtaccagaagataataaaaagaatcctattgttttaattatctcttttattctccaaggaacccctattcctgccaattcttacagacgttattaaggcattcagttagtttttcattcatttatttaaaaaatatttatcatgccaagtactatttaaatggtggagataccaaagtgaatgagatacatacaaggggccctagttctcaaggagctcacattcatgagaaattaagttcacacatgcaagatataccagatattaataagtattactcagatcattaaactagaatgaggccaggcacagtggctcatggctgtaatcctagtgccttttagaggctaaggtgggaggatagcttgagcccaggagttccaggatacagtgagctatgatcactccactgcactccagcctgggtgatagagtgagaccctgtctctaaagaaacaaacaaacaaaaagtagaaagatttgacctgagaataactagatagctattttagatcaggtattcatgaataaaataacacttaaagtgagatctgaatgacagaaagaaaagccatgcaaaaatcaaggagtagggtgtgcagatttcacagatggcaaatacctaacatggtgatgctaaagtcagcatgaacctccttctgtttcttgaacagaccacaggctggagaagaaaaggtaggaagaaggctggtataagatgagggtgaagagagaaccaaggccagatcatgggagctttatagccaggctaaggtgtttatgtttaattctaaatatagcagaatacattggagaagactatgctgaggaataatgtgacttgacttaaatttttaaaagactacctaactgtgtatggaaaatgaattgcatgggacaaggatggaaactagttgggagatgagttagaagattattataggagtccttgtgggaagtgttggtgactgttggagggtagtggtggtagtgaagatgcataggagtttctgagcttgttttggaggtagaggaggcaagatttgttaaagaactggcttagcagggtgggcacaaaggaaatacagaattaaaggataattccaaaggttccaacctgagcaactaagtagaggctggcatttactaagatgggtgagattgagagaaggggagtatcaggaggcaagattacttgttattttttagccatgtttacatttttttgagatatcttctgagtatctgagaagaaatttcaagtgggcaatttgttggacaagtttttggttcatgggagaaattaggacatggatgcaattttgtgagcctgtaacacacagctagtatttagagctaagggtctatatgaaatcacctaaatagtacttatagatatgaaagagaaggacagagcccaggggtactcttacatttacaggtgagcataaaaaagaaatcaaaagaaactctaaaggatcaaaagcaaagtagaagaaaaccaaacagccatgcgggagtgattgttgagatgttttgaaaaagagaaggttgacagtcatttaggaaggtgaggaatcaaacacagtgcagatgagggtggtgtagggagatcattctctaggtgccctttgcatttttgctcatcttacgatcagagtcactaactctcttggttcaggagttggaagatacagtggcctgttccagagcaaaggcaggttcagttgctgttcaggataatgaagataatgcctcccactgaggcaaagatcaacagagcttactgcccattataaaatattcagattccttaagcgcatggttcctctcctataatacaaacctcttgcaggtactgttgtcacctggcccttttcatatcaccctgtgaggagtggggcccagagaacctacacaaatgcaaacacttcaaccactgctattgtcataaagtccgtggtctctgacccaaagtctcatgtcccctgctagcatccatgaaacagtggcaggtgaactttgaaaacaggataggctaaaatctcagatccttcactactcttcacagatagtaggccattgtgatggtctacttgagctctgttgttgtggtggcatatctttctgtaccgatattcagttggtttgatgcaagcatggtacaggtagatgggtttatgccttagatatttaataagaatgccttaacacatgatcatatgtcttctttcttcactgacaatggcaccccactaatggagtgtgcaaatccaggaagaccagtgtttgaacgttgtggggtaaagtgccgataggtaagcccgcatatttagatatttctaagaggttctaaaatgatgaatactttcctcaatcatttgtcacaaccaaagtctatattcttatgcttagatgtcataattcatattaaagaattgggccttatataacaccttaatattaatagtacttggctaagcacagacgatcaacaacacttaattaatgaaactagttctgaatacattatatactttcagggtatataaggaggtaattacattttacagaggcatatactctatatctggtttattcgattgtgaatcaataaacatgggggttttttttaaaacatgatttctatgatgaatttttaatttaattgtaggaagctcctttaccgctgagtcaccagtgtcttcttgtataatataaagacattatggcctggcatggtggctcatgcctgtagtcccagcactttgggaggccgaggcgggtggatcatttgaggtcacgagttcaagaccagcctggccaacatggcgaaaccctgtctctactaaaaatacaaaaattaggcctggtggtgcatgcctgtagtcctagctacttgggaggttgaggcaggagaattgcttgaacccgagaggccaaggttgcaatgagccgagattgcaccactgtactctagcctgggagacagagtgagaccccatctcaaaagaaaaaaaataaaataaaagacattagccatctggagcagttaagtatatatttttctataaagcaatttaatgtagatgatattttctctctgtgtgtgcacaattgcatgcatatgtcaagtgtcgtgagattccaagtatttgacgatctgcttcttctatagacagttgggtacataaaaggagagccatgtgcaaatccagtctctggttctaggtttatacctcctcttctccacctccgctttccttgataacccctgatgcacacagccagccatcctcatccctcgagatgtggttgatttctctctatttgggtttcaggaaattgtttttcctcccttctgagagtctatgcgctgctgcaggccagtcagtattgattcaattctgggtgaatcctctctcactctttcctaagtgtatattgtatatgtagttcttctgccaaaagcagctttgtattaagattgtattaagatttaagttttcttaaatttgcaagtcacctaaaatatatcctgtgtctgctgggatccttttgatgttgaagcgtcttggagtagacaatagaggattttcatatggtggaagaatgttaggtgtccttgttggagaagagaggaagagtagagaacccctttaaagccctcttactgcctgttccttgcatctcatctctacatatttagcaatcacatctgctgatttggcaaacactaacagcagctacacagcgtcagtgaggacaatagtgagtggatttaaacatcaggggcgatgtaccagtgcaataaatagaatatatcattgtttcactgcggacagaatgtctgtgctctctatgaggatctgcatttaagcccaacacccaaggaaggcaaacatctaaagctcagcatggggtccttcaagcaggggaatacaaacaaagcatttttctcccaaaacacaagttttaggatttcatgtcaaagacatgctgccaatcagaagacagcattcccccttcttagagctggaaatggtaaccaggacacattggtatgcacaattctgctggctcagagcacacgcaagctcctaggctgtgactggcaggaggctcacagcgatttctttttttttgagacagggtctcactctgtcgcccagactggagtgcgcagtggtgcagtcttggctcactgcaacctcagcttcccaggttcaagcaattattctgcctcagcctcccaagtagctgagtttataggcgcccaccaccaagcgcagctaactttcttgtattttttttagtagaaacagggtttcaccatattggccaggctgttttcaatgtttttgaactcctgacctcaagtgatccacccacctcggcctccctaggattataggcatgagccaccatgcccagcaagctcacagcaatttttaatgcaatatgatcagacctaattttggctttttgatttcctcccttaaacctcaggcaggcactttttcaaaagagaaatcaatcagtcaatcaatcagtcaatcaacagtgagtgaatgaatgactaaattgtttgtttttagcatggcataaaataatccttaatattttgacctcaagcaaccattctgaccatatcttcttccatgcgcctttgactgagtacccagatacatgcagagtcaagttttctagatcacagccttgtcctctaattcagtgccttggtatgaaatctttcttcttctatgtcctttttttgccagatgaaatttcagtctttattcaagatcaagtgcaactgtctctttgaggaaagtcctttgaccgccatttctccccttcagaaggcaaacacctgggggagaagatctgcttaaggacctggtaactgacaaagaatggaatgggagcgagaaccgcctagccatcccttctccttgcacagtcatgaaacaaaagttgaaaaggagcctggttttacttgaccagtcataaattaccataaaataaaatgagatattaggaacctttgatctctgaaaaagtaatatgtgttgaaaagaaatatcactgttacatatagacaaataatagaaatatttgaggcatgcatttaaaatgtagaggccacttatagcaggcatattaacatgtgcatttgctttttaagaagtatacacacgtgtacctttagctttgaaagggtaagattcaatgcttgggtgatggatgcactaaagtctcagaagccaccactaaaggacttacccacgtaaccgaaaacaacctgtactccaaaatcaatgaaataaaataaaaaggtaagattcataaatagcaagttgagaatgcatgtttataccatgtagacaatgcatgataaattgttggcaataagacccatgtagctgactttggggatacaaagtagcttctgaaagaggttcctaattagccctgcctgaggtgactgcttaaggtatttatctgtagctggaatgcattgcctcagagacttgaggattcaggagctatgagtttcaaggccacagatgcagtggaatagtaaggcttcttcccctgcctggcacattgacctaactgatgagaggtgccttagggacccagcagctatggccatttatgtctagtccctcactctagaaaggaattgcttgaataccacggtgctggagtttgtagccacaatgctgaaggtcagggcagtccttcatgatgatgcatttctgtcagccatacttgcacatctctttaatgtctgcaatgtcattaagcagtggtgtatcatttttttttaatgcagaaactaaactgatactcaaaacctatgacaatttgaatccttcctgcctatccaaccttagtttttctgctcgataatataaattctccctttcagtcaggtagatagtcttcctgtcttcctgtcattcttggtttctctttgttgctcttgtcttccccacctgctgaaatgcttttcttctttctttcttttttttttttctgagaaaagacctcactctgttgcccatcctggagtgcagtggcataatgacaactcaatgcagtctcaagctcctgggtcaagtgatcatccttcctcagcctactgagtagctgggactacaggcatgtgccaccacatctggctaatttcttcatttttttgtagagactgggtcttgctatgctgcccaagctggtcttgaactcctgggctcaagtgatcttcccacttcagcctccaaaagtgcagggattacagacatgagccacccatgtacctggtttctctcttcttttctaactaatcaagtactttaagtcacaactcagggtgacaacctccacctccattgacttctccagagcatttcatttcctcttatcctttctctgcactttgttagaacttacattctgatttgtactgttgacctttgagcccttaagtttatgcaccttctctctctctctctctcgctcactctctctctctctgtctctgtgtctctctctgtttctgtctctctctttttctctgtcaattattttattctggtatttggtacttatgagaaatcttattagtatcctaaactctctcaaaacaggaaatgtgtattttccttctcatctaattcttaggaaacttcatataggaataaaaaatatgtagtagtggattgtctggtaaatgaataaaagagggatttgaggtcagtgggctgtttcaggacatgaccaaggaatgtggtaccagggcagcaacaagcttgctaaggggcgataaagtagtcattgtatataacagaggaatttgggctcaatgcagatttgccactaactctttggcagtatagaattcactagagaaatattagtaggttagttagtattcctaataaagaactgctaataccttatagagacataagccatgtttctcgtctttcgtttctgaaatgaaattttggccagggaaacattttgcatccctttttgatgtctacaaatgtggcatttgtcagatgtgagatagttaagtgtgtgtgtgtgtgtgtgtgtgtatatatatactttatatatgtatatatacatatcctatgtgtgtgggtatatatatatatatatatatatatatatatatatatgaatgatgcatggagagatatctctccatgcatccaaaatattcacaacttttcactaatatctgaataacatttgaaaaattgacaactcttctggctaaagatcagcatacacattcgttccacagagacttgtgccaaaatcttgctcagctcaaggggtactgcacaataaacaataagaaacttttataactccgactaatagaactcattgcttttccagtttgaagataaaggatgtctgcttgctttccatgcctaattttcctgatgctgtaaagctgttcaggaaagttcccactgcaggagttttgctagtaatcttcagctccgtgggaagcctttggactctgttgctatccctgaaagtggctgttcttctccatcagtttcctgggcaagggctcgaaccagctattagtgtctatttgcactgcatgaaaacaaaatttaatgtaaagacgcttatagcttgcctaccctaaaaccccaggagtctcattctgcctgaccctggacattttttgaactgatagagggatgggtatctggtgggtctcttcagtcagctcatctcagcatgttgaaagtccaaatgacccttgcctgaggatggtgaaagtaatttgtatgtgtgtatacataatcctgctttttcactatttccagtcacagattgcagagatagttgactgtgcttgttagtgtgagtgttaataactttgctatgctgatttttagacttcctatgctatatgatctccctgaagagcatgacagagcattgctttggaaaatcaatattcggcgtgattattccttctttcatgtgtaatcaaactttgaagaccaccaataggccaaatctacaagcattaggtttctaaacatattgtttagtcaggagaaattgtgttttctagctgaggtatgccagctactggtatggagaaaatctgcctagcaaattggaaggggccagaagctcaaatgctattgagaaccactcaacaattcttttttcttatacacaggattgaagcacagagcaaaaggaaaatccagctttgggatttgttcccttgaacttacaaatgattcattagaccaatgacattgtgagaatttggtctctgacaaagaaataaatgttttaaaaatagtgctaatacataggtacaaatacagaattatgtcaggcatgtatttttttaaagatagagtccagtgaaaagaatacgtgttagaatatggattaggtttctaaaggtatacttatgtctgccttcgtcttcagaaaacaaagttgtatgtacactttaagaaaggtcttagtgtggtaaacgtgaggcaaaccaaagtcctgttacttcttttgtcatatcattaaagcctccagacggaggtttcttcccattatgtgatgtgcagaatttcagatgtcagtcagcagctgaagtcaactgttggtccaccaggcctctaagctgcagcctctgtcagcttggggacagtgggatccatgtgacttgcctgctactgcccttgattgggcagatcacagagcagatggcctgtgtctagagtacaaggtgttaaggctttttttttggggggggaagaaataattcacatgtgctaatattcctggatgtttcactgataatataatatagaatgtatgaaaaaatcaaagtcaattagaaccagaaatctcctgatactggatgattctatacataaatatcttgcactaacagcaagaataataaaagttgtacaaaaaatgtctgttcttccccagaccatgagctccatggaggcagagaccttatttggttggtttactgcccttccccaatgtttctaccaagctgaacatgtatccagctctcagtgccccattgagttgaaataaattacagtgacataaactatgttcttcatcaaatgctggacaagcacgtttctcaggcaacttctctgggatcaacataagaacagggtgatgaaatgtgagaagcagtgagggcaaggacttgagcctggtgcctacctaaagtttacactccacaagtattccacccaacacttcagataccttctcttctttcaaagtcaacagtttatgcccattgaaaataaatacacacacccactcatgcccataggcatgtgtgtgctaccagaaaatatgtacatgttaggctctttggaagcagtggtagtttggtgagaattgctgcattggctcatcaacacagacctgatcgcactttgatttcatatcttgctatgcagggctcccattatctgcctgccatttgtgtgcatttatgtttagcgtcaatttctcctcccatgaggctataatctgccttgtaaggagctaaaatgggaaaagcagttagaatgatgagtccagttggagcctgctggggaacaagacagtcatcacaggccaatcggcagtggagacagggtggcccttatcacacagaggcatctggagactgagagagacaaagcaacacagctgcaagccgaccatgatctgctggaagcttcttcagtcataaagcaaaggacagtaattctgaatgacaatgtaggaaaacaaaaaagaagaagaaagaaagaaaatggttgagcccagacgatcatttttagttacggatgtcacaaatggtgattgctggtagtgaagtatctgaatctgaagaccagctgtatatagtatgtgtgtttatggaggtgtgtgtgtgtgtgtgtatgtgttggagaagacctgcatgcctagttgtagcactagccagaaattcttgtttcatcgtctagaatgtggccagaggtttgcctaaattctcataagtccattactgttcttctataaatcaggctgcctgttttgcataattcaccaggtaattcacctatcactaggcaaggcagctgccatggagtgcatgcaggaattcccttcattgactcaggctggtaccattctcagcatttttgctgtttatatatttttattttggtctcggttttcctttatctaaaaacgtcaagctgggatggatccttggagatgctcgcttaaacaagttcattacacttaaaatagttttacaagcacaagtgaaaataatgtaataattgcagcagattcttagacctccactggatcctgggttgcctgtttcctttactcagttctagtttctaagtttattgctgggttttgatgtatgtatgtgtgtgttaattttttaatatagaatatgaagtttgagggaaaactattgcccttattcttgtcgatttgttattcgatcttttcttttcctctttgttggtatgtgaggagttgcagagcaaagctgctgagatcttatatttgactgaggtttcacaagctctgcgagatatcctaatcttcagagtgacacctggtttagccaaccacgtggaaaaaactaagggtttagatataaccacattcaaccacagcctttaccttctcccctgtgctttgctgtatctaatgacggcccagaaaggtgcaaagagagacttttcagaaaaagcataaaaacaatcaagaaggaaaaaattgcttggttgttttctgagatacctgaaccagaagcaattgagtatttaggtgtaactttctatgacctattagaatgaatgccattcttatggcttaaatttttttcaagatgaagagggcacttatatagacaaagaatatatttcccataaagatatattagcacaattctaattaatcttaaatctaagtttttgttccccaagtccaatactcagtctagaacatatgcccttttctgtgatgcctgctggccaccatgtatgatcatggtatattgtgcattgtacaaagtgcccagccaagggctgaaatcaactagtgctctacttatgaggaattaatccaggcatggcgctgtgtctaccccagaggatgtgccttttctaattttcgtaaagttactgcaatgggccagccctgaagatatacagataacagaatcctatgacttttagatgacattagccatcatgagagcctgcctctctgtaaatggtgttagggtgtttattatcagcagcattgggaatacagttgttttgatgtgttttctgatgccctgttctaaaattcactacttctctgcaggctttggaaagtgggagtgtaaccactggtcctttgggttctttgtgaagttgtgctaaccataagatgccgcatactctcctagtgaccacagtttttatgggaggtgatgtacagcagcaaaagtctaatgtaaatctcatgttggttcttccagagcaggggcagctagagtctaataatttcttgggaagagtttctgtacctggaaattttagatgtatatcaaggacatgtgagcaaatgggaaatctaattgcccagtgcctctggagcaaagtgtagagacagaaccagaatgttttttaccggcacatttctgtattaaactaagggagggaagctctttaactatatgggaactttttctcattggttcctttaagtgtcttaaaaaaactgatgtcttcctaagagaacttgtgaaaggtggtaaaatgtttaattggaacttaagaataacttcctactgaatagctttgttgatttcactttcctgtggggaaaagatagacattgacaaaactgtttcgatgagaattaatcatagctgtagatttcaaggtatgttatgatactaggtttcatctcctggatcttcctcctctacattaaaatgattagaatgataaactcaaggcatattaatgatccctaatcaatgtaaaaaaattatcatttctcttctttatgctgtatttactgtcagaaatacagacatacatattaggaagatttttcttgaagggaattggcacaaaagggttgagacctttaattaatcaaaaaattgaccattccttgaaccttgattgtttggtatcattaacaaaggacatgagacaacatgttcaagctttataatttgctggaaataatattttctttttttttaaaaaaagcaattttttgttgtaattgttaatcttactatatatttgtctcctgaaaatggtgttatttgccactccttctacgtattaattggtgtaagctcttaagttatataggatagttttaatttctccaaaaagctgcctaaggaaagtaaaacaccataaagaaaagggtatgtacccaagaagtagcaagaaactaaagagaagagattgagatattatcatgagaatttaataagagaattaaatatctagaaaaatgtgtacatacttagaagtagtaaacattaatttcctttcttccatctatagttcacctctagatcactcttttctttctttagatcatcagtatccaagattggaaagagtaaatgagtgttgataaatgggcactctcttgttctgttgatataagcttaagttggggtagcttttctggaggactgcttgacaatatacgtcaaatttatattgtgatgtcctttggccatgcaatttacccttcctggaatgtacgctaagtagataattgaataagtgaaaaaccaaatgtcttcataaggatattcaccatagttttgttgaaaattatttacaaattggaaacaatctaaataaatgtcaatacaggaatagtttaattgcatatagaactgtacatacaatgtaatcctatgcagtcactaaaaatgaaaatgtataggtgtattgattgccctgggcaattaccataacgtataaatgaatgagtaaaagtatcacagaataatactcttccctcctaagtaaatcctcaccaataaatcctattatacaaggcaaaacctgtatattatccctatcccctaattttcatcatctctcatatctaatccaccatgatgtctttttcattcctaagtgtgtttcagatcatccacttccctctaactctatcactgtcttctggtccaagcttggtattcaattaatacttgttaaatggattctgaatatgattccattcataacagcacacctatccacgtacgtatgtgaagacacaggtgcctagagaggtgttcactgaactactaatggtggtttcctcttctgtggtagaattcagcattatctttatttttttatttgaatttctcttgttgtttgaaatatttttaaataataatgtgtaatttacccctctccaaaaataaaacttataaaatggggatgataactattattctacctttctcactggataaacatagtggtcaaataaacaaatactcgtgaaagtcttttataatgtgaaaacaaaggtttttttgttattatgtgcaataataataataataactatagatactaaaatttgttgaatatatttcctcagtattttgagtgtcttaactcatttaaatctcacaataagcctatgatactataaatatacccatttcaaatatgaggaaactgaagcagagacagacgaaataatttatccaggtagacacagccagtagagctgaggcaggatttgaccccacacaatcaggccctaggacccaagccctaaccactgtgccaaaatcataatacctgcaggaagtggcaaatgttgaacttagctccatatatcagactcttgccactgtgaagcccttacagataatttcttttcttttttgagacggagtctagctctgttgctcaggctggagtgcagtggcgcgatctcggctcactgcaagctctgcctcccagtttcacaccatactcctgcctcagcctccctagtagctgggactacagccgcccaccaccacgcccggctaattttttatactacctcagttaatttagaaagattttcaggcactgatgaatgattttgggagtaatcccaagccaaatgacctctgttggaagtaatttaatagatgtgtttaaatattagaggtgggtgagatggtgaagaattaacatttgaggaacatttggtatcctctgggcaatatgtagacaccctttcaataaatcctcacaacaccccagtaagttatgtgttatttgtttctattgtaagttgcagtcatagataaggaaactcagatatgtattaagtcatttgctcaggtctttacagctattaagttgcagagttgggagcccatctaaactcctaagatcagggtctggatcacctctattattttacattgggcatctatcatccaggacctatgtgctgcaggaacgtaattaagaatgactttgacaagataaatatttggggacatgaagcctgatcacagagtctaccagttatgtggacttgggcaagcaacaccatgaacctcacttttttcattctcaaagtgggactaatgaaatttttcctgcttctccaaaagataattttagtcactctgttggtgagttttgcaaaaacattgtagtataagccttcacaaggaattacagagaagaagataagtcttagcattcaagaagcctggactgtacctgtctcaaaattattttatgctaaatgcagacaattttctctatttggagtttctttcccatcttagttggcctcttctcagttttctgaatgaagcgtgcaccctcggatgtctggcctttactcctgcatgtcttccggtctggaataccttcccctccctcaggaacttaaccagcttcaacatgcagccttcctgaacactccaacatgaagggatgcccttctgttctaaatgtccactgcactgaacaaatcatttaatacaaatttctctgtagtttatacagaggatttgtgtttatgggcttatatgttttctttaaaaataagttataaagtttttgatgctagagcattcttttgtatccccaggagacactcagaatatatttgttgattgttttgattttaaagaaaaaggcggaagaatgaggtaaaatggccactatctgtcaggaacttcatataattatctctgcccagaaataaattaaaatagttttcttcagccagttgcaatagcttatagaaaaaaattaccttccctagatgtcagtgtcccaatttggaaaacagagtttggtcatatattttgtccgctgttgtacaacctttagaaacataaaattcaagaggaatactaaataaaaggatcaatcaatactgagttcagctttaaaattatttcatctaataatgctggttttcttggcagcactagcaagggctagaattttttaaaaatcatccttatatatgtattgattgaatttattaaaatgctttattaccatatccatttgcttataagaaggcaccctgatgtgtcctatatgagtttcaaaacacaattaaataaaaccatgcagagcaacaaacactacgtagcatttacaaactgcatttgtattcatttttatgtacatgaagggaaaaaaaacccaaaaggttgaaagccttctggagtgataaatgccacaatttagtggaaaatacacattgtaatttgagaacatctcccactaagagtcagtgtagctacagggacaagaagcctggtgctaaattgtctgaacattgatgtcccttcaaaattcatatgttggatcctagtacccagtgtgatataatcaagagataaggtctttggggaactgattaagtcatgaggggttctccatatgcatgaatgggttcatgctcttataaaagaggttgaagagagcaccctagggcctcttgcccttctgcttctgccatgtgagggcgtagcaagaggcactctttatgaagcagagtgagcccttgccagacactgaatgtgctggcgccttaatcttggacgttccagcctccagactgtgataattaaatttattttatttctaaatgactcagtctaagaagttttgttatagcagcccaaacagactaagacccctggcccacaggctcctgagcatctcagtgcctttgaggctataaaggacctcgaccttcactttcagcacatgttcaagtaaaagagaaaaatgtgtgtaaagaagtgcccatacccaataaacatacccatatttattgcaaattatcctctaaactgtttcattgtggtcaaaacccaagttataaatttttagtgtccttttaagagttcagtatttgtcaacctacggtcaacatttgcatcaacaaagaaggtaagatatgttgtgttatctttgtcatttttcagctgtcaactaggataggggccagaaatagcaaaactgtaaacttgaaattgtttcaggaagaagtgtaatagctaaggggtgtctatgaaatggaatgtatatcaatatgaggtaagacagctggtaaaaaataaaaaattagcaggaggggcaccggattcatgtaccagggaaaataatgtcatgttcattgcccagagagattcccaggaattagagattgagaaatattatttcttgacatgtctagaggctacgtggatagaagttctggaaaatgtttgagataaaggccaataaaaagcaaaaggacctgaggattctgtttattcactgaacagagaagctaaaaattgggctctcattttggacaaaaataaaagccatagtaataagtaaaataaaataacctaccaggtagcagagctcttagcaaaggattctgcaagcaaaaggcaggtgtgaattgggaaagtgagtctgggattgaggtgaggtggggttaggtgtagaacagggctatgaaggtcagggcagtggaaggtttgattctggaaagcatggcttcaagggaaaacttgagtggtgaacgggaaaatctgtgaggatcggaaatgtaagtctctatacttgctggggaaatgagcaagaaatgaaagggagagagccagatgacgcagctggaagcagaaatctgagcagggggaacctggcaacagagaggaggagctggaagaacaggggcagatcagatctagagccaagctgtattctctggccccatactttaatattctacctatgaggcgcagtgcctttgggtgttgttcataaaattccagtgttgaaaagggtttcagacattgtccgtgaagctcctctatccatcaagccctttgcaatatttacagtaaggaaagtgggagcgcttcagaaagagagagagagaaaaatgaaaattcctagccccatctagacatgccttatcagtgagttaggcgaagtgcacaaaatttaaaagtaagattctagttgtttgtattttagctattcacgttgcatcacaagagctccacaactggatttaaataattgtttctgccttagcaatcttaagtgtgcatgtattgttcagctattcctttaggggaaagattgctagatgggaataaaatggaaatgctgttttctaaaagttgtggtcttcatagggagatagctcttcacttcgtgtgttagtgatgaacatttgcaagctgtagagctgtagagaacactttgtggttcttctatttgaagaaaccctgatggctttgtcacatattccaagtttaacttttatttttaaagagtttatacatcatatttgaaaaagactcaaacatgtctagagttatatgttagacactaaacatacttgaaaaagatttaaaaccttggttttagtcatctgtaagtactctattttaaggacaactaattaatacttataactcagataattcaggagacgatcaatgattatgaaataacttcctatgacatacttttaaatagtaaatgccttcactgcatgtaattcacacatcaatatatactaaactatttccattaatatagccagtctccaatttacaggaagacattatgtttcacaagttgattttaagtgaattttttgtaatatagaaagaattgtcccaaagagtgactgctgaactggttaaatccacaaaaaaaagcatcacatgaattcatctactaggcaaatttgctcatccactttcaagtcaaaaaaaagttttaaattagataaaaacctgtgtatcccctttcttagtaaatttgcctgctgtgataaatatacacgtgcacacaaaaataggcatgcatttttaagaggagtagaaacccatttgaacttgtccaggaactcaagtttagaggctcaaatgtagagaatactaataaccacctataataattcttttggagaaggcatactgtattatgcctagtgcttaataggacaggggatttttcatctctcatgtgcctgggaatgagagccaggggcttcccccaattctaaaaaaattagcaattcagcagaatctacagtggggccaaattgtggctgggatttgggggatttcatcaaagtgggtcagaggtagaggtggaagagaagcagaaggccggtgggagtaggatacagtacaggggcgagcttccagctggctccatcagttgaggaagaagaagcaatcccaggaggtccatactcttgatattttatccctcctctcactaaggacagctatgccctttgtgatctgccctagactgactttttaatacagagaatgaaggccagtacagaaagcaaggagagaaagaagagaaatagatgctaagttgtccccttgaggaagaatgagggaaaatggagttcctgccaccctagtctattagctgacattgttactcctaattcaaggtaattattggtatgcaaagaaagtatgtattaactatatgtcaaccagtaactccctgaaatccacttgatgatagaaaattagtctatggccatatcactgtgaatgcaccaaatctcatctgatagcaaaatattgcatacatttcttctagaaactaagaattccaatgaaaagctatgaaagaatcctacttaggtctgaatttccatacattcctggtatctcagagggtggcaaggttagaaaacttgagaatctgtgggcacactagggatgaagtgatagtattctttgttggatatcaaaagaaatctaagcaggagaaccaaaatccattggtggaaccaaaaaaccattggtggtctgaaaagttaggtgggagaattgaatagcttagttctagggatcaagtaaccaccctgactattgagcttcccgataagacaacatgatggaaactacatggtttcatccaggtgctgggaacaagtcctactgaacattggcttttggacaaataacaggcagattctttggtgaagctttgttcatctgaaactcttccctgtcctctcttctccacttcatttttctgatgaggagaatggaagtttgtataaactagagtgctcaagcagcaggcagtggaagaggcaagacctccaagtagatctgcaagctctgaaccaagtgacctatctctaggccatattgaggaaggccaatgcagttttgcgatctctctacctcttcatttttccttttcctcctccccttccccttttgctctccccctcttcctctcaagagagtaatgtgctagtagtacctgatggtaccccagtgcttcctgccttcctcccttccacttcctgccttcctttctcccacttcctgccttcctcccttccacttcctgccttccccagtcccacttcctctcttccttcctggcaccccccagcactcccttccctccttctgttctccagtaccttcctttcttttcctttgcccttctctcttcctccttctctctttattttccttccttccttcctctgcaaggccttcttactagtttccacccattttcctatgtaaagcgattttgaattctagccatctgttaatacaaggcagtgaaaaatgttgaagtcacatcaaattccacttgctctgccagttaaaaatacagatgcttcctgttttatgctttcctctcactttctctagagtttaaacatgaaaatatgttccatgataaaaaccagcacatattccctttcatcaggaaacatattccaaacaatgaaaggaaggggagggggattattttcacaagtccagcaaggatacttggatgttgggggaatcatttgtagaaccataatttcacagagcaagaacataattattcacaactatcacattttatagatgaagaaactgagatcgcagggaattgttataattgttctcatatgtgctgcatatcgacttgccaaaattcacatcagcttaaattttcacccaacatgcctggtcctcaattgttccacaatactttttgctatccgctgatttcagaaagggttcttttggctactgggagaggccaaatcactaagcaatggataattaacctgaaactcagtaaatgcactggagtgaaaaaaaaatgtgagactaagagtcaagacacctgggttctagtcacaaatctgttactaactacccatcccaactcatagcaaaaatttttattaatactcttgctccacaaagagactagatcaaatggtctctaaatttactttcaactctttgaatcttgagttttcttccttcaattttctgctgactcagagcgtatagccttggccaagttatttactgccataaatctcattttttttccaagatgaaagggagaataacacattcccctattttcccagcatatatatatatacactatataatcttgcattaaattgactatctttagaaatcacattaaatcctttctatctatagactttggattagtcactaaagctagaataagacatgggccatatcattaggcaatgtctctggctgtagttgtattatcaaacactgcattgacgcttgttcatccttgcttccatcatacctttttatgtaagctgttctaattcttacatgactataacatggagcactgtatgtcaccatatctcttcctctcattgaatctgatcgtattctaatatctcctatctcaatgcctagttcttcacccattttaccaatgcaatatagaaactttcttactgcctttttatttcttacttttcttttgaataattcaccaagttattattgattttgtctgcctgatgtctttcaaatttatccacttttctctcttccatgatatcctaatctaagctaccatcacccctcaactgaactacagcagtcaaaagggttatttccacacagcagtcaaaaggattgtttcaggtgctaaatttggcaatgtcaccccactgaatggctttcttctggtcttaaagacccgattccagaacaaaacttacatggtaggcagctcctggcccttgactgtgtttctagtgtcatagtacatgctcctgaccttttgccctctttgagttcctcctcctcactatcctttcctggagattcaggtttggcagttccccggggttagaatgctcctccatgatttacctagttgctgcttattcttctggttttgtactgatggtcatgttctcagagcagccttctcagcctccctgggtcagttccctccatcatgcaccatcattgtgccttgtatccttgctgttattatacttatcagagtcgtaattttacatttgctcatgtcatactttttagattatgctttgctttcttctccttcaccagagtgtaaactctatgatactatgtctatttttatgtcaccattgtaattccagtgcctggcataatatctaatgcatagaaggtgcaggctaaaattctattgaataaataatgaatgaaaagaaagaatagaagtgcctgagttcaggccctgtatccccattccctcatatatgtggttggaaccatagaaggcaaaatttggtgttaaaagaataaagctggcaagcactgatgtgcctaacaggataggaagttcagaattcttttttaaaagtgttcaagggcccaggagtgcctggctaacataatgagacccagtctctacaaacatttaaaaattacacaggcatggtggcatgggcctgtattctccgctactctggaggctgaggtgagaggactgcatgagcctaggaggctgaaggcttcagtgagctgtgatcacaccactgtagtccagcctggtcaacagagtgagaccctatctcttaaaaaaagttctaggatattggagttgataatgtttgtaaagatcaacgctaacattgcctccaaccaagtctcaatatgctccaaaaagaaatacttcaaattaaaactcgtgtgtgtgtgtgtgtgtgtgtgtgtgtgtgtgtgtgtgtgtaaggagaggtggctcatacctgtaatcccagcactttgggaagccaaggcgggcggatcacttgaagtcaggagttcaagaccagctggccaacatggtgaagctccgtctctactaaaaatacaaaaattagcgtgctggcatgcacctgtagtcccagctactcgggaggctgaggcatgagaatcacttgaacctgggaggcagaggttgcagtgagctgagatggtgccaccgcacttcagaaacagagtgagactctgtctcaaaaaaaaaaaaaaaaaaaaaggccgggcatggcggctcacgcctgtaatcgcagtattttgggaggccgaggcgggcggatcacaatgtcaggagtcccagaccagcctggccaacatggtgaaaccctgtctctactaaaaatacaaaattagccgggcgtggtggtacatgcctgtaatcgcagctactcggtaggctgaggcaggagaatcgcttgaacctggaaggtggaggttgcagtaagcagagattgtgccattgcataatggagtgaaactccatctcaaaatatatatatttttatatatttttaaatatatgtttataaatatataaatatttttatatacatatctatatatagagagaataaatatgtatccacagagagagggagagagataccaagacaaacttataattgctataaattcaaataagagagaagtcagtaaaacctagagtaactaggaaatactccctagaggccaaatttgacctgtgctttgaaaggtaattacaattgggacaggaaacggcacggcttctttctcaaagattgattattctgactattctccattagctcttccttatacactttccactttcccaaactctgtcccgggatgctgacatgaaccacgtcaacaggactccctcacatcctgtcttcaagtagcatttgcccagagagaggcctcaggcaggaggttgtaggatggaaggagagatttgcaggcattcatttccctgctccctccctgcctggctgcagtgggtagtagctaattcctcttctgaaggccacagctcctggtggatgcccccttctcacttacaactgagcttctcagtgggttaccccttcacaactagggttggtcatggctttctgatgctgtgatcacccagggtacttttaaactctctacttatccgtctggggtgccatgtgttatttgctaagaatgaggtaataggaattttttaaaaaaagattaaaataatactatcagcctgtcaatggggattcctcccacccccaaaaatagagttgttcgtttctctttgtttggtttacatgatatatatatatatatatatatatcatgtatatgtatatgatttacctcaaaacagatcacaaagctgaggtcacttgaaactgactattacaagctagctggtagaattaaacttgtttccctaagtaaaatagaaaaatttggccaagagataagaaaatagctgcccctcaccaccacaaacacatacatacacactatactgaatggatcttcatagagagtaagttaataagaggccagcccctacctctgcttccctccccagggacatacatataaatagttcagttatgtctgacttaatagatttgggaaggaggaaacgtgagaggctagtccttctgaagggttgggaggtaagggtgagggaagggaggggagcaaaattacggtactgggatttggacccagataaaagctgctttgtcacatcatcccgatgtaaaatccgtgcatctgagagatagcccctgagccaccacacaggctcctcccaccagagtctgtctggcaggggtcagtgctgcctcgctgtggattagagggagtcatcgacatgtcatctgccatcaaccacacttattgtgaggaaaagaatgccccatacacatagaggccacccttgggatggacttttgagttgactaaagagtaaaaatcacaatggatcatccactagtcagcattattacctttactaacaaaaccagtagcttagccacgatcgtataaaacaataaatgttggttaatttctaaagtacattgattgttttagtttttgttttaagaaaaaggcttggccgggcgcggtggctcacgcctgtaatcccagcactttgggaggccgaggcgggtggatcatgaggtcaggagatcgagaccatcctggctaacaaggtgaaaccccgtctctactaaaaatacaaaaaattagccgggcgcggtggcgggcgcctgtagtcccagctactctggaggctgaggcaggagaatggcgtgaacccaggaagcggtgcttgcagtgagccgagattgcgccactgcagtccgcagtccggcctgggcgacagagcgagactccgtctcaaaaaaaaaaaaaaaaaagaaaaaggctttatgtggctgttgggaataggattatttcctctaacatttatcccagtatttttaaaataaagaaacatttggtcgatgaaaagtatagaatatttgtggtaattataataagtgaatacattacataatgtcctttgtgaaaaaggcttacattattataatgggaaggaggtaaattaatctgagtagtattagtataatagtcttagtaattataatggaatgaatcaccctatattataattatgattcaaataatatatatttttagagatcaaccgtttcatgatgtgctggaatgggatgtggtaataggagagcagtgattttggctaacacattaggtattctgagtcaatttggcacaacagcagaaattattttctctattgtcttattgagaagaaacgtcctaagaaggatcttggggaaaataaataagtatgtgagtctgacataggaagagagggtttcttcccctgcaaggcaccttgtgaaagcctagtggggagaaatagtgggatgatgaaggatggggcaggttacttctggaagcaaaattcagatcccgagtgcaggtgttgttcaggcctctgtgccccactgtaagtgtgctggcttcattgaaagggatgagaataaggcagacacgttcaaatatgcagagtgagggaaaatacaaagagcatatttgatattggttgaatgattgagaatatttgatatttgatattgattgataattgatgagcacttactgtgtgactaggaactgaactaaatgctgccccagagatcattcttatttatgctcacaccactcatgaagcaaaccattgttgttattttcattcttcagatgaggaaactgacagtcagtgatgctaagaaacttgctcaaggtcactacagtagttattgtgggcctggggtttgaattcagcctaactccagagtctatgaccttaaccattaagtgaaataagtgaacatcttcatgttcaggacatgtgatgtgtgtgcacacgcatgtgtgtgtgtacaaaataaaatatttgaagccaacaggatcctaagtctgggtgggtcctaatgccagagtgcttagggacacttcctttttaagcaagatagtttgacattgtcagcttttaattgtaatttaatttcttgtgtgaacattattaaaatgtattaaaaccagatcaaaacatccaagacttttatccccctgatttttatagaagccctctgcttacaagcacttaaagagagatgaatccttatttttcctctggtaagtgatttctaaattcccgtagaaaagcctttaaaaagaaaactcaactagctgcatttatggacttgaatacctacactctactaaaattattgccttttcttaatgatgttcctgactcatcctgaaaattgatcatatatgtataaggtgatgctcactttacaggtggagaatgttgtagccacaagtaatgaagactaatatatagatatttaaatccacattttgtccagaattctcaagcagggagttctaacctagccccacccctcattccctcattaagcattgttttcttagaaaggattaaaactggtaatatatctgtaatcaattagctgacatgacttaaaattgataagtcatttgatgaattctcatctcaaattccgaatgaataaacaatgagaaatgggaaagcctttggcagagagagactcattgaatcagttaattaaggaaagagaaagagccagagtacaagctatcaatatcacctacatgggtcaagaactcatccttatgtgtgtaataatagagctactcataaacctgaaatgatacaattaattacggaagttatagaatattggagcatcctcgggtgaaaaataattgtgtctatattataaaagtatgcaacataacacattttatctgcatttaacattttgttggtgtttcatgcaaatgaaaaaaaaaaaacactgtttttatgatttagccaaaccatgctaactctagtaacaaccctcccaatctcagtgttttaatgcaacaaacagttgtatcttgttggtataaattccactgcattgttcttggttgggttgttccttaaagaggatactcaggaatccattctcttcctatactgttccagaggaagatggctcctccattttcaatacgtggcttcaaggtcacgctgacgttgttcagacagtgttctgttggaagagtgagagaaaaaagcatgtacatacaattccttccaacacacatacacttaactgctttggtttgaaagtgacataaaccttctgctcacattccattggccagaattcctcacacagtccccacctggcttagtgctcaggaagaggaaatagatttgatgatcatctaggcaatgtctgtgatgagattggttcaaaaaatgtaccagtaaaaataaaaataatcctgttcattacattccagaaaatgaactgattaaagacaaatatgtatgcatcacttttctctttacgtagtgaagcaatgtgaaaaacatattaattgagctattcatggcaagacttctctttataaacttcatacatctgtcactaaattgatatgaaagaaatatttgatctcagaaagaattttatctatcatgatggaatgctggcagccaaatgtatacctaaaaattgctgaaatattggagtaaaaaggaatagttagatcgatcatcttaattttgtgaaagcatgcgtacatttttcaccttggattcagttgtgttggcattttataggcacagttataaatttgcctaaaatacagaatggcattacaacaaaactcagactcatggtgtaatcattgtttttttcaaactaaaaacaaagaatgaaaaataaaaacctctaagaacaaaattactccatttaattaaattaaacagacaaaacttggaggcatagtagagatggcaaggaaaggcctcagaccccttacccccatccaggggaaatatttgccagccactcctatcttcagcaaaacttgagttatgatgtaaactcaagactcttaaatttgtgattaatcctgggtgtcttgaaaattggagagtgggttagcaaattcatagttccccaaatttgtgctatctactgctgttttcttgtggattataagcttgaaggaaatgtgctgcctagagatatgagctgtgtgtaattactcccacctgctgggtaaaatctttattacatgggcattagacttcattcccatcgaggggtgaggaggggtgcaatatgaaccaaccacaccacaaggcttgtgaacatccttcctctatggtgtctcctgacacttctttccagcttccaaatgtgatacaactttgactggaaactgtgaaccaatgtgtatccaatgaaccaagggagatttagctccttaaaagaaaattaaatgtagaaagatgtggaaggatcaatgaatcatatttatccaataagtggttcaacaattacaagagcgagacaggaagggaacccttccaggcagagtggtcctcagctctggttttccagcctagagacccatgtggcaggaacttggccttcatcattgaataccctgcatacacccttcctcaagcctcctttgtatgtgtgagagcactgacttcagaaacagaaatgagtttccagccctcaagggaactgtttgctaaagattggcaggagcccacaagactacgacacagtctttgatgagctggctctccaagtgtgggcagacttttgtttctaagttattgggaggctttctgtgggtataaaacctgcaaaaaacacaagcatcaatgttgccatattaataactgctttcatccttggcaagaagaaaaagaacgtggggaaaagagtcaggcgcaaacatggtttgagttttattgtcttttacttgctcactgcctacacctcccaccagtagctttggaaagagagtttcagaaatgttatcttatgttttttatccctaagaatggggtcatagtcttcaatttatgcctaaagtgtttaactactccttcttaatttactcgctctgcccaggaagaaaacagacataacttgcaaaggtggaaacactggtacgttaggaatatcattcattttcggattcttggcccttgagtttcactgttacttaattgacaaagctgagctgtttcatttcacgctaggaagtctttggttaaattgcaggcttgggtttctgtcctttggcagtggaagtaaagagaaatcagaagcaatgtagcatttatgaaccactggctcctctaactgcctctgtggcttcaaatcctgatgatgtcaattgtggtttgtgtatatgtacgtgtgtgaatgtgtacacacatgtgagtgcgtgaacattcgattcatttctcatttttgttctctctcttttcccctcacctccggaccttttcatccttctttatgttctgttgccttcatctcttagtttttctattctatgccccttttgtttctactcttttcatctgacctattattatgtcatcagctataagcaccatggaaaacactagtttcatcatctccatctgaaagaaaaaaaaaaactcaacaagggagaagctgaatatatctgtcttcagtatctatctttgaatttggaatgcttcctgccaagaaaattatattctgaaactccttagatcttgcagtcttcatgaagcacaccagccaatagctgcctcctgacatcagctcagatatctggttgacttttgctgctagctcttccagccaatgaaagtagataccttaggccagtgttcccagacatttaggttttatgggataataaaatctccaggagcaaaatgaagaggctgatatattgccttctctttaaattttaacacttttgaaaaactgccatctacacactaccgctttttacattttaacacttttttaaaactaccatccattgtcatcattattccataaaaagaggtattttaggaaggatactcacaacataagttggataaatttagcaattaaaaaagcactgctttacttttatcttctcctttaatcaaagatgggatatgaatatcaaccagcattgatccaattttaggcccttagttccaataaaattgttccttttcccatataaatggttatgcctttgggccaattgctctgtctctcagaggttattatatcctgttgcctctatattgaggattgctgtttcatctttggagttacaatgtcccaaagggatcactgatacattcttagctccagtatataaatagaggcactaagaaataaaatgagagggttttgacacctctccctctcccccaccccccaacacacacaaacaagtaaatgggttagcttttatttctacaattgcacagcatatttagtgagagagggaagttggaggtgggtatcacacatgtaagatattgcccttattttttttttttttcagagacagtatctcattctgttgcacaggctgaagtgcagtgcctcgaacatagttcactgcagccttgaactcctgggctcaaacaatcttcctacctcagccttctgagtaactgggactacaggcatatggccaccatgcccagataactttttaaaaacatttttgtagagatagagtctcactatgtttaccaggctggtgtcaaactgctggcctttagtgatcctcccattttgccctcccaaagtgctgggattacaggtatgagccactgcacctgtcctggcccttattattgagtagattgtagtctaatgaaaacatatgagtataataaacaaaagaaaaaagaaaacatatttagccaattcatagcaaaaggcagacagaagtagatgctgaatagagaaacaagactgttagagggcagagaaaggagtaattcattttgctggaagaatcaaggaagcaatcacaaaggtttaatgtgtaattctgaatttatgtgattgctatataatcattctgtttcatggctgcagtgtaagctgtgtgagggcattgtttgtatcagatgtctgaacctctttatctcatcccttatcatagtgtctggtatctagtctataacccataatatctcctgaataactgaatgggtgcctacaatgataagtggtgtgaaagataccaagaaaatcaagtatcattcattgccccgaaagcacctgtgagcacataggtttgcaaacatgccacatgtgttcggtcagcccattgcttgtgtacatgatcatagatggtcatagggatttacttcattctgaaatggaataatttcatcctcaccctgctttaccttaggtaaagattttgatgccatttttattaagacatttacttggaagtaaatgtcatgctgtgaagagccattatagacaaatattgtagccacttgccaagtaatgacttatgctgggaagttgcttaaaaggctgattttattcattttatttgctatacccttgtgctacttagagaagggtagagaatgagagaggagcaatatgttttgttctcttttttttcataaatcagtaattatttgcagagtgttttgtgtaaagtgctcagctcacaactggaaatagaatcctgggttagacagtggccatagtgatatttacatatctccagcttgtagtttgccaattgaaatgcagacatatgcggaaattgcctcattgtcattccttgtttttgtaatattatccttggctctacggattcattttttttctccttctactgtcaacactgttttagcagtgagttatattatccggtgacatcagagaagcaaagctacatgtgtcagcttggcaggaattgtccacttacagcaaatttgtgacaagttgtatttttctaccattttcacctggagtgacgaagaatctacagttgagggagacaacatggacctcccctgatggtaacagtgctatgtccaattgagctgctgttgcttcagtaccaaagaggaaggagctggtgatctttgaataatccttcccctatgaaaagtaggaatgtatccccagagttcattgtctgtatctgtaggtaatggaggcttaactggcattaaaatcatagccagtttcagacccattaagtttaatggtttttgtaatgataggctgcaactgatggaataaccaaaagaacaattcatggactgtttatggaagaataccttcaccattcaaaatggacattaaactatggctggtttcattgcaaggcaaaagttccctctttatcttctagttaggtccatgtgcagcccaggaggtatgtaaaagctatactttaggagaaaagttgacttgaagcttttaagctaatgagtttgaacttggcatgttttctattatcattgtctttaatcagtggtgttatataataaggagctaataaattaatctaagtgtaagtcaaattaatataagttaaagtcaaaatccagctaggcaaagccagataggcatattaaaatggcagcccctaccccaattccttgataatccattaaaagtagaaagttttggttaggaagccacctcctgttacgtaaatcagaatgtaagagccatgagattagggattttcatttgttttatccacttttatatcctcagtgtctagaaaaatgcttagcatattgcaggcactctgcaaatattgaacatacggggttgatgaacatataacccattttggttgatgtagttttatttcttaagaggtaaaaattctttcagaaaaagaaaagtaatcatttctacaaaataaccctccactggttgatattcttcccagatctacctttcttcacacagatctttttttaagagaaaaccacagggatatgtggctggtgcaatcaatgataggtttgggatatgataaaatgtaggaaatggctaaatgggagagtacatgatttataaaatagaatttaaaataacagccctcaacagcagatctttgccagcagcacatgatgggaaaatataaaccccattctggggatggcatctggtacagattgagaaataaattgggcagcgaaacagaatgtgtcttcagtggtccttaagatcaaaccaccaatgataagcatggatcattggagcctccaccttgctctttttgaaacagctaaaatcagcaagggaatgaaaaggaaatggctttatcatctgtgagcagcttgcccctccctctggagatccaaatctccaaacatgcattttgatatactttgggagttctctttatctagtaatttcatttaggggaaaaaaatatagctctccctgcccacatcccacattgttacatcactgattcctcaccatgctaacacattcaataatctgacgtgcaactcaactagaagagcaatcacagccagtgatgggccggcatcatggagagtaaagacaaatggaaacaataataactgtggaagaagcagatctcaaatgggaaactcaatcccagtgatcagggaaaactccaaaggaaggatatgagttcaaaaaaatcaattcaacaaaaacttattgtctgtctaccatgtatcaggcatggggatatattactggtcaacacaatgtgctttgctgcctggtgcctgtgttctgatatctggtgtgcatgttctcaatggtattgcaagttgcattgggctagaatcatgaagtattatcaggggatttacttgaaattaaattagtcccattcttgtggaaatctggagctggcatatgcatggaagtgaaggtcttgttgctggttgaatttagtgccctctgcaatgaaagccaaatcccaactttagtctgtgactggggggccttctacaaagagaatgaattttaacaattaaccaacaatctaaattcttggaaagtgaaagtttctaaaacataaaatccatgaagacagaattagaaaatcaatgtgtcctttttggaggaagaggaaagccgctggctgaccacgtcactttcatgtttctactcaaatcttatcaacaaggcctttgttgaccattcatccccttcctaggcccccttatttctatgtctgtcttgtatcatctgacacattgtaaatgtccttatttatttgcttactgtctgtctcttcactctgaaatataaattccatcatgtcagggactttttcttcatcttccccaaatgatgtttgaagcctcccatctaatgctgagaggtatttccctagtagccctgtcatcactttcctaccactgtccctgttgccacataatttaagattccctgtggccaatgctgatgtcattatcatggacgtccttaggaaacgaaaataatttaagcttctaaaatgggcaaattcgatgtagagttgatgggtacatcacacacccatctagaaaagagcatctcaggttggtacctgaaacttggtagactccaccccaagtcacatggccaactgatgtgttacttcttagacatcctgctttctctgtccataggcctggttgggtggtctttttcagatactaaatcatggtacaattggttttcataaaactagtactctaattctacttttccagtagccttgagtaaaggaatgttgaaaacttgtagtgatgaaacgtgtaggatttgcgatttgtcggagtagggacaaaactatttgagaacatagtccagctgaccaaaagaaaataagttctcatattactaataacttttagggatccaataggctcaagaattctgaggttgggtttgacagtgattagtgtaaattaagtagaagtagttaagaaagtggctgaaattgaaggatcggttgtggttagtaaatatggaggattgaaacacaatgcaaacttgataattgataaccttcatttaattctaactaaaagcccactttctggtccaaagttggaactaagaatgaattctttttactctgagaggatatttacaaagaaaacacaaacacacaaactatgggtaacacaaaagcaaactagaatgatttatcttattattctgttatgggttgaattatttcctcaaaaaatatatgcttgtcttaaccccagtgctgctgaatgtgactttatttggaaatagagtctttggaggggaattagtaaagatgaggttatactcaagtaaagtaggtccttaatccaatacaactggtgttcttattgaaagagaaaagacaacgtaaagacatagacacacaggaagaacaccatgtgaagacaggcagtggtcagaattatgtatctacaagccaaggaatgcctgaggttaccagaagctggaagaggcaaggatcccctccagagcccttagaggaagcagggccctgacaacactgtgatttcagacttctctcctctagaaccattagacaataattttctgttgtttgaagccaccaaatctgtgatactctgttacacaaatcctaggaatttgatacaccttcctagacccaagtggggaagaaaagggagaaacaggtttagaggtggagtaaaagataacagcttctcacaacttgaggcaagatgcgtatgctgatggcagagaaaggagttggcattttctgaaagcctgtcagatcccctgctttgtctgggaaggggaggaatatccacagcgtcttagcaggtgaaatgcagcagcgaagaccaggtgcctgtattgttgcctctggttgtgcagatgaagagtcattaggctgacctcatctatggacccaactggaattagccctgactctagagccactggatgttcaggcaaaactgaccctaaaattctttttaaatgcattgcttaagccaagcattctcttattcaaaatcaagctgctgcattttcatgtagcatgaaatgcaattttctatttaaggtgttcaactaacttagggataggttgatggccaaacaaagaaggtttcattaagatggaaatgatttggagtatctagtctccaaagtgattgctctagagacatttatcaatccaccggtggcttctagtcgatatttggttttataggttggggcaaaagtaattgcagtttttgactttttaattgcaaaaccgcagctacttttacaccaacctgataatattccccagatccttccctgcttcctctcattagtaaccagagcaggctgagaatcacttacctgtctcttgtgttccacaatgcacactttgaccccatctagtctcttccaatatcatttactcttgtccattagcggattttctttacttcctgtgtgtctagcttgttggggggatagggaggagaggagaggctgaggatattttttctgtgtgtgtgtaaaggttattcaaattctttatcacttgcttttgctttttaggaagaaaaaaacatgaatatcttataacactattttttaaatgaaattgttcagcaaattatacttaattatatttttaattttaagttctgggatacatgtgcagaacatgcaggtttgttacattggtatatgtgtgccatggttgtttgctgcacctatcaacccgtcatctaggttttaagacctgcatgagagggtggagccaagatggccgaataggaagagctccagtctagagctcccagcatgagcgacgcagaagacaggtgatttctgcatttccaactgaggtactgggcttatctcactggggaatgttggaaagtgggtgcaggacagtgggtgcagcgcacccagcatgagccaaagcagggagaggcattgcctcacctgggaagtgcaaagcgtcagggaattcccttttctagtcaaagaaaggggtgacagacggcacctggaaaatcgggtcactcccaccctaatactgcacttttccaaaggtcttagcaaacggcacaccaggagattatatcccacgcatggcttggagggttgtatgcccacggagcctccctcattgctagcacagcagtttgagatcaaactgccaggcggcagtgaggctgggggagggacgcccgccattgccaaggcctgagtaggtaaacaaagcggccaggaagctcgaactgggtggagccaaccgcagctcaaggaggcctgtctgcctctgtagactccacctctgggggcagggaatagccaaacaaaaggcagcagaatcctctgcagacttaaatgtccctgtctgacagctttgaagagagtagtggttctcccagcatgcagctggagatctgagaacggacagactgcctcctcaagtgcgtccctgacccctgagtagcctaactgggaggcaccccccagtaggggcagactgacacctcccacagccaggtactcctctgagacaaaacttccagaggagcgatcaggcagtaacatttgctgctcaccagtatctgctgttctgcagcctccgctgctgatacccaggcaaacagggtctggagtgaacctccagcaaactccaacagacctgcagctgtgggtcctgactgttagaaggaaaactaacaaacagaaaggacatccacaccaaaaccccatttatacatcaccatcatcaaagaccaaaggtagataaaagcagaaagatgaggaaaaaacagagcagaaaaactggaaactctaaaaatcagaacgcctctcctcctccaaaggaatgcagctccttaccagcaatggaacaaagctggatggagtatgactttgatgagagaagaaggcttcagacaatcaaactactctgagctaaaggaggaagtttgaacccatggcaaagaagttaaaaaccttgaaaaaaattagatgaatggctaactagaataaccaatgcagagatgtccttaaaggacctgatggagctgaaaaccaaggcacgagaactacgtgatgaatgcacaagcctcagtagctgatttgatcaactggaagaaagggtatcagtgatggaagatgaaatgaatgaaatgaagcaagaagagaagtttagagaaaaaagaataaaaagaaatgaacaaagcctccaagaaatatgggactatgcgaaaagaccaaatctacatctgattggtgtaactgaaagtgatggggagaatggaaccaagttcgaaaacactctgcaggatattatccaggagaacttccacaatctagcaaggcagggaacattcaaattcaggaaatacagagaacgccacaaagatactcctcgagaagagcaactccaagacacataattgtcagattcaccaaagttgaaatgaaggaaaaaatgttaagggcagccagagagaaaggtcaggttacccacaaagggaagcccatcagactaacagctgatcctctcagcagaaactctacaagccagaagagagtgggggccaatattcaacattcttaaagaaaagaattttcaacccagaatttcatatccagccaaactaagcttcataagtgaaggagaaataaaatcctttacagacaagcaaatgctgagagattttgtcaccaccaggcctgccctaaaagagctcctgaaggaagcattaaacatggaaaggaacaaccagtaccagccactgcaaaaacatgccaaattgtaaagaccatcaaagctaggaagaaactgcatccactaacgagcaaaataaccagctaacatcataatgacaggatcaaattcacacataacaatattaaccttaaatgtaaatgggctaaatgctccaattaaaagacacagactggcagattggataaagagtcaagacccatcagtgtgctgtattcaggaaacccatctcacgtgcagagacacacataggctcaaaataaagggatggaggaagatctaccaaacaaatggaaaacaaaaaaaggcagggattacaattctagtctctgataaaacagactttaaaccaacaaagatcaaaagagacaaagaaggccattacataatggtaaagggatcaattcaacaagaagagctaactatcctaaatatatatgcacccaatacaggagcacccagattcataaagcaagtccttagagaccaggaagagacttagactcccacacaataataatgggagactttaacactccactgtcaacattagactgatcaacgagacagaaagttaacaaggatatgcaggcattgaactcagctctgcaccaagcagacctaatagacatctacaggactctccaccccaaatcaacagaatatacattcttctcagcaccacaccacacctattccaaaattgaccacatagttggaagtaaagcactcctcagcaaatgtaaaagaacagaaattataacaaactgtctctcagaccacagtgcaatcaaactagtactcaggattaagaaactcactcaaaaccgctcaactacaaggaaactgaacaacctgctcctgaatgactactgggtacataacaaaatgaaattaagatgttctttgaaaccaacgagaacaaagacacaacataccagaatctctgggacacattcaaagcagtgtgtagagggaaatttatagcactaaatgcccacaagagaaagcaggaaagatctaaaatggacaccctaacatcacaattaaaagaactagaaaagcaagagcaaacacattcaaaagctagcagaaggcaagaaataactaagatcagagcagaactgaaggaaatagagacacaaaaaacccttcaaaaaatcaatgaatccaggagctggttttctgaaaatatcaacaaaattgatagaccactagcaagactaataaagaagaaaagagaagaatcaaatagatgcaataaaaaatgataaagggtatatcaccaccgatcccacagaaatacaaactaccatcagagaatactataaacatctctacacaaataaactagaaaatctagaagaaatggatacattcctcgacacatacaccctcccaagactaaaccaggaagaagttgaatctctgaatagaccaataagaggctctgaaattgaggcaataattaatagcttaccaaccaaaaaaagtccaggaccagatcgattcacagccaaattctaccgaggtacaaggaggagctggtaccattccttctgaaactattccaatcaatagaaaaagaggaaatcctccctaactcattttatgaggccagcaccatcctgataccaaagcctggcagagacataacaaataaagagaattttagaccaatatccctgatgaacatcgatgcaaaaatcctcagtaaaatactagcaaactgaatccagcagcacatcaaaaagctgatccaccatgatcaagtgggcttcatccctgggatgccaggctggttcaacatacgaaaatcaataaatgtaatccagcatataaacagaaccaatgacaaaaaccatattactatctcaatagatgcagaaaaggcctttgacaaaattcaacaactcttcatgctaaaaactatcaataaattaggtattgatgggacatatgtcaaaataataagaactatctatgacaaacccatagccaatatcatactgaatgggcaaaaactggaagcattccctttgaaaactggcacaagacagggatgccctctctcaccactcctattcaacatagtgttggaagttttggccagggctatcaggcagaagaaggaaataaagggtattcaggtagtcaaagatgaagtcaaattgtccctgtttgcagatgacatgattgtatatctagaaaaccccattgtctcagcccaaaatctccttaagctgataggcaacttcagcaaagtctcaggatacaaaatcaatgtacaaaaatcacaagcattcttatccacccataacagacaaacagagagccaaatcatgagtgaactcccattcacaattgcttcaaagagaataaaatacctaggaatccaacttacaagggatgtgaaggacctcttcaaggagaattacaaaccactgctcaatgaaataaaagacgatacaaacaaatggaagaacattccatgcttatgggtagaaagaatcaatattatgaaaatggccatactgccaaaggtaatttatagattcaatgccatccccatcaagctaccaatgactttcttcacagaattggaaaaaactactttaaagttcatatggaaccaaaaaagagcctgcattgccaagtcaatcctaagccaaaagaacaaagctggaggcatcatgctacctgacttcaaactacaaggctacagtaaccaaaacagcatggtactgataccaaaacagagatatagaccaatggaacagaacagaggcctcagaaataatgctgcatatctacaaccatctgatctttgacaaacctgagaaaaacaagaaatggggaaaggattccctatttaataaatggtgctgggaaaactggctagccatatgtagaaagctgaaactggatcccttccttataccttatacaaaaattaattcaaggtgattaaagacttaaatgttagacctgaaaccataaaaaccctagaagaaaatctaggcaataccattcaggacataggcatggacaaggacttcatgtctaaaacaccaaaagcaatggcaacaaaagccaaaattgacaaatgcgatctaattaaactaaagagcttctgcacagcaaaagaaactaccatcagagtaaacaggcagcctacagaatgggagaaaatttttgcaatctattcatctgtcaaagggctaatatccagaatctacagtgaactcaaacaaatttacaagaaaaaaacaaacaaccccatcaaaaagtgggtgaaggatatgaacagacacttctcaaaagaagacatttatgcaaccaaaagacacatgaaaaaatgctcatcatcactggccatcagagaaatgcaaatcaaaaccacaatgagataccatctcacaccagttagaatggcaatcattaaaaagtcaggaaacaacaggtgctggagaggatgtggagaaataggaacacttttacactgttggtgggactgtaaactagttcaaccactgtggaagtcagtgtggcgattcctcagggatctagaactagaaataccatttgacccagccatcccattactgggtatattcccaaaggattataaatcatgctgctataaagacacatgcacacatatgtttattgtggcactattcacaatagcaaacacttgaaaacaagtgaaatgcccaacaatgatagactggattaagaaaatgtggcacatatacaccatggaatactatgcagccataaaaaatgatgagttcatgtcctttgtaaggacatggatgaagctggaaaccatcattctcagcaaactatcgcaaggacaaagaaccaaacaccacatgttctcactcataggtgggaattgaacaatgagaacacatggacacgggaaggggaacatcacacactggggcctgttgtggggtggtgggaggggggagggatagcattaggaggtatacctaatgttaaatgaggagttaatgggtgcagcacaccgacatggcacatgtatacatatgtaactaacctgcatgttgtgtacatgtaccctaaaacttaaattataataaaaaaattaaaatataaaagacctgcatgcattaggtgtttgtcctaatgctctgcctcccttttccccccatcccttgacaggccctgatgtgtaatgttcccctcgctgtgtccatgtgttctcattgttcaactcccacttatgagtgagaacatgcggtatttagttttctgttcctatgttagtttgctgcggatgattatacttaaatatttttaaacaaggctttagacctaaatccatcaaaataaaccactttgcatgaaaaaaaatcatgggaccatttcagcatgttctataggtgggctgatttaaatgatttccttatacatctctttctgcttgtgctattgaataattgagaagtttgcagggggtgtggtgccttgcacagaccgagaaggaagagaaaggaagcaacacttgcaaaaggactttgttgtgtacagtgatagaatgctctacctgtgttactcattgaatcaggaggattgttgaaggaggagggctctctggaattgtaatctgaagaatgagggttattcatcaggaaaagagggcaaggcaaggggagggggaagcataggagaagaaataaaaggcccagaattctgaaaaactccatgctaaaagacccagaattccgaaaaactccatgtcagcagggtcaaaataaattttgtggaatggttacttagattgagagaaggactaatgagaaatgaaactagaggtagagtcagagatcagttaatagtcttctattttaggttaaggaattcccatttcattctgaaggtcaaggacaacttaggtaaagggcagtgactaagaaagaccaccctggtcaggctcgatggctcacccctgtaatccaagcactttgggaggctgaggcaggcagatcacttgaggttagcagttagagaccagcctgaccaatatggtgaaaccctgtctctactaaaaatacaaaaattagctgggtgtggtggtgcaagcctgtaatcccagctgctctggaggctgaggcaggagaatcacttgaaccctggaggtggaggttgcagtgagccaagattgcatcattgcactgcagcctaggtgatagagtgagactctgtctcaaaaaaatagaaagatcattctggcttttgggtggagaatagactgtccatgggcaaagtcagagtccaggaggccatgccagaagctgctgctgtactttaggcaaattctatgtggtggtggcattggtagtaagagtggagaggaatatacaagttagcgatacatttaggaggtaggttcgataaaacttggtgatttattaagtttgaaagtgaagaagagggaggagtcaggattgacttacacatgaaacatataagacttctttctgtcctaaaaaaaaaaatcaccgttgtagaaaatgatagaaactgatggacataagaaagcaatcaggatctcgattctcaatgccatgtgaagaaccacatgctcttttgacattttaagtagagatgtacatttggtttctgcagatccatttcatagctcggctatgatttcagactcattactcaaaagcaagggtgtaggatcaggggagggtgaacaagttaggcagaggaatgagctgctctgtgaggtggtttgctccacagcctttcactccttcttcccaacgtctcacagtcataaaaaaaaaaaaaaaaaaaaaaaaaagtaggagggagtgcctatatccagtagaattggagacaagttagggacagagctcagagagctgctcctgatgcggaagtggcaagaaaagacgcttcacctccctgacaacaacacatccactgtgtgtagcaatacgtttctgcctaagacaatttacccccagggaaatacaagaagggagacatctcccaggaaattaccatttgtttctactactgaaggattttcgtctatttatttgagaaaagtgagaagcttctttttgctgagaacatagtaaatgctgcaaaagcatttgatgtcatgtccattaagtaacttggctgaatttcttgaagctttaggtaccttgcttcaattcctgcatactatttactgaccctctgtaacaggacttttcaactttcaactatattagaacatgtagtttctctattaccaagttccagctgaacagtctatctttaatattcagaaagtgtttggtgtctactagccaagactgtagtctgagcaatgacattgacagtggaccttgatcttccttcctttgaagcataagtgccttgtatcattttactttcctctagtagaagtccttcctatggttatagtatttagtttctactttttgcatttaatcggagcatctttgtaatttacaatttttaaatctttttttttcaaggactaaacacgaaggtttgaagtccaacaggcaactaaagatgtatacaaaccccgcacaaatcagcctccattctaatgccattcctcttctatacttccattttttaaacctgagcatatattttgttttgagtcttttcttactcttttatttgttaatactctttattcagtttttgtcaggtaaaaatgttttgccttgccaaagaaccatctaattccttctcaggtctttttaatatattgcttccagatatttttggattggtggtttctgcaattctccctaaaacaatcttcgtttctcttacacatctcattctctacgctttggcagacttttgcagatgcattctataactgcacaaattacccttccaattttctccagctaaacaatctaatccagggtcctaaatatttttggtgccatagactcctttggcattccagaggtgcccagggattttactcaggatagtgtctttaaatgcatgtttaaaatacatcagattacaaagaatgtcaattaaattgaaaaatagcttaaatattttaataattgtgatatagtaataaatgaacttctttaggtgcattaagtaacaagatctactaacagggctaataacttattatttcagtatgtctgtggtttctattggtgacaaaaatcacaagtactgttaatatttttgttttattttgtttaaaattatttaaattttaattaataaaacatatatatgtatatttatggtgtacagcacattgctatatgtatacattgtggcatggctgaatcaaagtaattaacatatgcattagctcacatagttattttttgtggtgagactgcttaaaattcactctcctagcaatttttgactgtgtgctgcattgtttttttaactatagttagcattttgtaaatagtcctcttagaattattcccccaattgaagttgtgtgccctttcaccaacatctctgcattttctccttccaccactctctgtcctgagtaaccaccattctattctctgcttctatgagttcaactttcttagattccacatgtaagtgagattatgtggtatttgtcttctgtgcttagcttctttcacttaatgtaatggtgctgttcatattactgtggttttggtgcctacattcaaactcagtggaaattctaatttgcagttagtttttcagaaagaagaaatgtgtgaatagtttcttatggtccaagcccttggatcctctgtattttatccacagatgcttgggaggatctctagatcccagattaagaactccagctagttattagtcctttgtgctttgaaactcaaatcaaatacccatctcttccatagaactttttctaaattcactagactcacttatctacccttcttcctatagtttcattcactctctgttatgaaatatccatttattatcactattagtttttctgtattgctctcttctttgtaaatatctctatactttattctcttttatttcctttgtatccaggacagtgtctggcatatgcaggcacacaataaatacttgtttaataagtgaattaaaactctagacagcttctggtaagtttttccaggttaccagtaatacaaagacctgaatgttatttattcacttctacaaggggcacagtgtccaagtcctgacctttaataagagatgtgcttccagcagtgtcttcttggcatagtcttaaccttttattctgccctggtgcacacttaatctctcatgaagtcacagctattgatttataactgaatcttcaagatattttaatactttataaacatacaaacaacaattaattgcattgttagataaaaatgtattacagagatcaccagcacaaaaataagtatttctatttataactgaaaaaaaaactggcaatggaatattagttgtttacaaggcaagtattctgaataatgtgctgggagattataaataaccttaactaacagtaaaaaaaattgtgcttacagaaaaaaattatttgagttagtctaaatgtattaaacttatcagtaagtagcatgaattaactactattcaagtgtaaaattctacttccatattacctaattcagttccatatgaagtcagccagcaaggatcagctgaggttggctgttgtgaggtttcagccattatgaaaaagaggagctgggcacagcctctgatgaataataacatggcatgggttctgataataagcacagagaatcagaaaggaaaaaacacagagaggagtatggagaactggaacctgtggaaaatgatacacaatttttttttttctacagagtctcgctctgtcacccaggttggaatacagtggtgggatctcggctcaccacaacctctgcctcctgggttcaagcaactctcctgcatcagcctcctgagtagctgggattacaggcatgcgccaccatacccagctaatttttgtatttttagtagagacagagtttcaccatgttggccaggctggtctccaactcctgacctcaggtgatatgcctgcctcagcctcccaaagtgctgggattagaggcataagccactgcacctggccccacaggcttcacagtcagtaggcccaaaggaagtctggtgtggtcgatcaagaatccagctaattctcgcactctcactgtctctctctttctctcaccttccactgacctctcttccctcctattttgtcttgggaaaaggcaggtgattacaaaattcttctaattatgtattttaattaatataaaatctttacaaaacagtgttaataccagcccactatggtttatattttttgctgtgaaaaaaaaatctcctatgctttagcaatactttttaggcagagagtcatcaaaataaaagagtatcagtattgctgaagtaggtcattcctgctttactttaaaaaatttcaaaacgtttcatttttcctccgtaaaatttatttctatcaaggaaatggggagagaaaaattacaatgaaaaactgtgaggataaatgaggtcatatgcctatgaaatatttggaaaagaattataattatcaacttgttcatttttaataccatagttagatttctcattttaaaaggggaaggaaagaactccattacattctagggattctaggcaagataagtttccatcacagttgctggatggtggagctgggctggtatgacattctttccttgtagaacgtgcgttctaactgaagactagccctttattagaaatgcacattgagaagacaggggatttatgagtcacaaaggccaagatttctaaccttgctacatgtggggcgggacttttctatgctcccaaggacttaaggtcaagtcactttcttcctgttcccgtctccttctgtcttcctctcttttttggttctaaccagaaaatgtattccaatttttcttttctttttctgttcaagtcttacagctctgccaaaggcaaaatgctgcagggattagaaagatgaagcagctaagtcaaatcgatagtgacagccagtgaacgcatgtaaatttcaacaagtgaacgttcagcattgtctctggggcctcccaccaatattaacatcactaaattttctgatttaacattctcacaaaacaggaatcaaccaaccaagtgccagccactaatagccttcaggttaataaatttggtcttcattaatctcaaattagagtcctggagtagacttatgtttgggataggagtgcccatcctacaagaagcttattacccataaatcaggtaagagataagaaaacactcctccaggtctcattagccacttcagataggctctgcagctctttaatgttcaggtggcatgtccttagaagatgagctgagaatcaaagctcctgatacaggaagaagcctaactcagcccatctctcttcttggggcattcacaattatttcctttaacccttgtgtagtttcagttgtgttgattcaagtcattattttcttacacaactagggtatatagtttagaatgtgatagaatcttggaaaaatagcaattccccattatgtatacacacaatacacatacacacacacagtactatatatgtatgtgtgtgtgtgtgtatatatagatcacgtaaatatatatgatatatatagatatatagagagagtacatgtacatatatgtgtataatatattcttcactttcattttatttgtctttatgatttcaggcagtggtataagaagatagaaatagcatatgagcacttcacacagtatctgctataaaagtttattttgacactttacttataactccttgaaagtgataaaattttcctattttcctgaaggtacatttagacaaaaatctcagagcctaatattttgaagtgttagttttgctgaggccaaacaaaatcaaggcccagcatataccccgaatacattctcacttaccataaatttattatgaaatggtattgtgttgataggagagtttttgttacagcctataacatttcagggattttgatagacatgatttccaatgggataacatttaaactgagatagctactatttttttttaatatatgtttagttttgtgaaaaaaaaaataaggaaagcatctggtgattgaacaaatatgtagtagagctaaagacattttccttaaaagaaatatacttgttttatgctttaatggttagagctgttccattatagtgtatcatctatactcttctgatttttattacaagtagggatacaacttaaagatttaaaagtccttcccaaagtataagcatgtgtttaattttcagaatggcagtgagacttacttgcacataaagttaagatacctaggttgtgggcttccaaggatacttccttgggaagtctttagaagttgtttttagttaaggacttggtagcatcaagggaagccatgagtggtgaaattctcagagagactcttctttctgtggtcctgccttgtagatgacattctggagacttttgtgtgtaaatgaatgattgaaattccatagtatatttgtcatttttcctaagcctgtttactctggggaaaatcttctttcatccttctaagttcttactccacactcccgtgggtgctcatgcatgtgtgcatgcgtacacacacaaacacacacaaatatgcatgcacacatcttcagtacttgaggcattaacctgcagaaccataacaccgtgaatatagcagtaaaggcaattatttctgtaaacaggtaacagggtgtattaatattactgttagtacctctgaattctttcttccttaataggatgtattaatattaccgttattacctctgaattctttcttccttcccatcatgctagagccatcttgaatatgacttaagaagtgatctttacattttgcctctgtctcaaactaggttctagtggctattaggggctagaccaaagctaaactgagaataaggttacgatagcacaattgttcataggtggtctctcaagacaacagcattgcaaaagaaggaataattgttatgtttattttacctatgggggaaaaacagtagtccgggcagtctaaatgatgtgtccaccatcatagaataatagagagtgaagctgtaagtataattccggttgactttgtatccagtaaaatgttcattcaacttttgttcatctctcctctagtcacactttgtcatgcattgacttcttggcctgatctcaccagtgaaaacccatgggaacagttaataattccatgactaaggctattataatcctatagctacagtttctccagtgaaataatgaaaatttcttcattaatttattataaaagttactgagtttaattgtatgccatcctggatttcttacagaagtgattcttgataatcctaagaaaattcttcttcagacagattttcaaaatgtttttgtctctgcaattactgttctgaggttagatcttatagaagttactccataagaagccaaagcattttcctcaaagtatagtggctaatggctatgctgttaccaaaagctgtgacagaaaacctctggctattaaactcatatctaatgctatttggcctagctattatgtacaatttgagaaactgatttttctcttctaaaatgaaacacaaggccgtgtgcggtggctcacgcctgtaatcccaacactttgggaggctgaggtgggtggtaatgaggtcaggggatcgagaccatcctggctaacacagtgaaaccccatttcactaaaaatacaaaaattagccaggcgtgatggtgggcccctgtagtccctgctactcaggaggctgaggcaggagaatggcgttaacccagctggcggagtttgcagtaagccgagatggcgccactgccctccagcctgggtgacagagcgagactccgtctcaaaaaaaaaaaaaaaagaaaaaagaaagaaaaagaaaaaaaaagaaagaaagaaatgattcgcattgtagggtcatgaatttcaacacatattacagttcagccccttctctgctgctggtggcacactggagatgtggagatgcagattctcaccacacaaagtggggtccgtcctggaagcttgtaagaaaagcagaatctcaggccctacctagaacctactgaattagaatctgtgttttaacaagatctcttggagattcagaggtacagtaaagtttgagaagcacagctggaaactgtctgaagtctgctatgatcatcttaatcttgggagctgacttagcacagtttctgcctctcccagcccagcctctctgccctatttaggctacttctggagagttccacagtcagaaccttagctatttctgtgcctggtctttaccacacacaggtccaaagatgcccaggaaagctaaatcatagacttccccctactgagcatgttgggctgcctgcagtctctccctttatcataggttggccctctttccacattgccatgcagctttgaatgactgaatgttcaaatttttcacagtgttttcattgcttaacaggacatccatggctgtaatttttcagtgaagcatagaatgtgttaattaaagtggcaatggaattgggacaggttgaatattaaatgtcacttctattgtgaataccatcatgctcttaacatttttattttgttttcatgaagacttagtaagggttaaaagtgggcgcattagtgagctggtatttgcctgcccaccaatgctgattttgatttccatggcgtagttctttggggtcagcatgcatggtgtgttaaatgttaccggggacctgaggaataggagagccctttccttatgacacttaatcctgaattatttatctaaataattaagggcaagcatttttaacttcgttaacctatagtttctgaataaaagagttattgagagctctgactcaaggacaaatgacaaaagatgatccctggagtcagggcatcaccctccataagtctcactggaggtttgcttcctgcacaaggagacatgtctgtgatttgtgaagcattcatcttgtttcacaagactttatgctgcacttaggctaaagtcactgccgaataagtcacttcactatcaagaaagaaggggatggcttttctgggggagcagaggcatattaaggtagaggaggggtggcgcaaagcagtccagccaagaaaaaaaaaaaatcttactaacaggcttagaattaccagcacatgttgatagcagaaagcagattggcttttagccagttttattcttgtttttaaatctctaaagacaacgtacccacttagtgcctgcacttggggcaacatgctcccactcccacctcctccttggtatgccagtgcagaggagtttgttcacacatttaagatattacataaaatacatctctgaaggtcgacactctcagggaagagcaagaaatgactggagcatcttagctgcaagataatgtcttattcagatatctttactctaggattatagattttttttttttttgagatgaagtctcactggatttcccaggctggagtgcaatggtgtgctcttggctcactgtaacctccacctcccaggttcaagctattctcctgcctcagcctcctcagccgctgggattacaggcattcaccaccatgtccagttaatttttgtattattagtagagacagggtttcaccatggtggccaggcttgtctcaaactcctgacctcaagtgatccacctgcctcagcctcccaaagagctgggattacaggcgtgaaccactacgcccagctggattatagattttgacactcagattactttggctggtctagtaggcaaataatgacaagacatgctcctgccaaagatgtccatggcctaatctccagaacctgtgagaatatgctacattgcatggcgaaggggaagggagactgcagatggaattaaaatagctaatcagcagataggaagatcatcctggtttatccatgtggacccaatgtattccaaggagtctttaaaagtggaagagggaggcagaagaagagagacagagtaagatgtgactaaggaagaatggttaaagaaatgtcgctggtatcagagacaagaggaggaggccgtgtgcttcctcttcatgtgggctatgcatattctcactcataggtgggacttgaacaatgagaacacatggacacaggaaggggaacatcacactctggggactgttgtggggtggggggaggaggagggatagcattaggagatatacctaatgctaaatgatgagttaatgggtgcagcacaccagcatggcacatgtatacatatgtaactaacctgcacattgtgcatatataccctaaaacttaaagtataataataataaaattaaaaaaaagtcaaggaagtgaattagaggtccctagaacctccaaaaagtaatgcaaccctggatggcatcttgatattagcctggggagacctgtgtcaaacttctatcctgtagaactgtaagataacctgtgtttttcttgtaaaagatttcaacatttgctttagattcagggggttacatgtacaggtttgttacatggcatcacctagatagtgagctagtacccagtaggtagttttcctgcttttgcccccttccgtcttccccctcagtagtccccagtgtctgttgttcccatctttatgttcatgtgtatccaatgtttagctcccacttataagtgagaacgtgtagtatttgattttctgtttctgtgttaatttgcttatcaacctgtgtttttaagcctttatggtaattacttatggagcaatagaaaactagcacaatagataaagtcaaaattggtatggtatgtagaacctaacagagcacggtcctggctccacatctgattagtaatgtgcaattggtaaatttctttagccttattatccttatctgtagaatggacataataatatttaccttatggggttaagagagaatgaaataagaaagcaactataaaatgtctgggataatgcctatcagggtggggctgcccaaagatactaaatttgattttatttctttcctcttatacaatttggtggccctcttagtgagtggccccatatcgttaaggcttactgctaactggcccccctgagtccttagaaatatcaccacatttattgatatttcactgtgttcctctgagaacctcatttggccatatagtcttctaccaatcactggagttttcattagtgctagattggcattagacacatggttatagaaggatctagtagattattattttgtaggagacatcatcagtgctcatgttaaatgaatgatacattctgttgaattataaactgcctctcctacacctttgtctttgtacatttcagtccttcttctctattcaaaactgacgaagtaaatcagttgggaagaatacagtaatttatttgaataaacatttgtcaacattgtttaggaaaataagttacaaattgactgtatcgtcatgttcctgcactaagaaagcattaggagtctgcctaaatccttttatcaaaatgtattattattattattattattattaatttttttctatttactctttcttttttaaaaaattgctctcctctagatattttttctgccactctttataataaaggagacaatatttctaactgcccaacagacttcaagatgatcttgacagcctctgtagccaaattatcatattaatttgatctcagcaacacttctggttcactctgttctgtactcaaatccaaatcctgagctttttcttgagcaaataaaggcaacagctgtgaggtcccagttcatctttccggttttacccatacaacaacaggctgtgcaaagttgtgagcaattcacacatagtgctctcaactctatttttattaagtactctgaagagcaagcaatcttcaaactcctataaaatttcatgaccaaaacagctatcgggatggtgtttcccttgaaatgtctctatgagtacagtcatttattattctaggcttcctgataatccttattagtggataccagaactgtgattttaccgtatttgcaacctaatgagtaagtctaccacatgaatgctggcagaagatacaagattcctgggtcagagatgaaggatagtttattgctacaggatagcagaataccagcatttatgccagtccctaaaatttaagtcccatggggcaaagggaagagggccagacaatgcctgcagatgtaataggggagagttgagtttagggtacccccaaattttataataggcagtactttggtccagataaagacatgttttttatactggatagtagacaaacatccatttgctccagttggagacaatacttctgtcttcccatagatgttcactgtgcaaacaattcttgaaacaattgcctggaacaaagttatcagttattagattttttttttttttgagttggagtctcactctgtcacccaggctaaagtgcagtggcatgatctcagctcactgcaacctctggctcatggattcaagagattcttctgcctcagcctcctgagtagttgggattacaggcacccaccaccatgcctggctagtttttgtatttttagcagggacagggtttcaccatgttggccaggctcgaactcctaacctcaagtgattctcctgccttggcctcccaaagtgctgggattacaggcatgagccaccacacctggcccaaagttattagatcttctgttcacaagatacacagaaatgtgagaggccataacaagttgtcaccctacaatgagtttcttagatgtaaatcgactcttcccttcctatgttggtaagaattgtgccatatgaaacatcatcataggcatatgtaatgttaagcttttttgccgtaagagaaaatttttccttgcttccttagcagaatacaggcttcagttatgtgatcaacctgtttggatctgctaggttaaactataaatgcatttttaaaaatactacagatatttcactggacaggaaatggggatggggaagacagaggagagagtgtatggcctggtaacaaagcattaccctttctgttgcacactgctgcccattttaatgttggccagcagccaggacaaagagccaaggcagctccaaaggatctcagagttggaggcaagagagagtcaaggaagctcccacatgctgaaatgtcaaacctaagcagacctggcctcagagtacaacacaatcagatcttccaccatcagagtcattgatagccacactggctcccttgctgtttctggagcacagcagacatggacccacttcaggtcctttctgctggctctggtctgtcataggtacactccttcacctgatcacccagggatcgctttcttatttccttcaagccttcttcatccaagtactgaccaggcctcacactgcttagcttccgagatcagctgagatcaagcacgttcagggtgataaattagttcaatcactgtggaaagtagtttggtgatttctcaaagaacttaacacagaacaagcattcaacctagcagtctcattactgggtatatatccaaaaaagcacagattgttctaccaaaaagatacatgcactcacatgctcatcatagcactattcactataacaaagacatgaaatccacctagatgcccatcaacagtggataggtatacatatgatacgtatacaccatgtaatactacgcagccatacaaaaggtatgaaatcatgtcctttgcagcaacatgaatgtagttaggggccattgtcctaagtaaatcaatgtaggaagagaaaaccgtatgccacgtgttctcacttttaagtgggcacaaaacattgggtacccatggacgtaaagatgggaacaatagacactggggactactagatgcaggaaggtgggaggggtgaaaaagctaactattgggtaccatgctcggtagttgggtaatgggattatttgtatcccaaacctaagcatcacataacataaccaagtagcaaccctgcacatgtaccaatgaatctagaattaaacttgaaaaaaataagtaagtaaaacataaaacatatagatttttaaaaggcatcttcaaatgtcaccttgtagtgccccaccctgaattgtagtcacctacacacataaactcacacacaaacacacactcccatacacacatcaaaacattcaatacacctaccttactctatttttttttctgacttccaacatagtacatcatttatttaacaagaacgtaagctcaacggggaggaattgttctctgtttattttctgatgtttcctaggtacctagatcagtgcctggtgcatatataaatgaatattttgagtgaatatttgtggaatcatgaatgaatgaactgatgaatgttaatattggtatttttcattgttatttgtcttattcctaggaagacaggactagtcatttgaggtactttttcagaacagccagggctggggaggatcctttatttgtgggtgttaaataatagcaagtgaacacagtgcagcagtagtgaccctgttgatgatgataatgaatcacattgatatagtgcttttctttttctacctttgtgtgtgtgtgtgtgtgtgtgtgtgtaattctcctcagtgtcagggtgatagattatgcccattccttctaggaaaatggttattccatcttaatgcaggcttttagaaatgaaaaataatgcctgctacaatcaacttttaattatctacactaatggagtgctgatgctaaagaaataatccccaagtcatttacatttgactttaggatgcaaccgagggcttgtattcagaaaagcacgttaaaccatcgtcagcagcatgtgattgcagaacaaattctggcctgggagttgggaaactggatttggtagaggctcggtgttatgggttgaattgtgatgccgcccccctgccaaaaagatacgttagaatcccagcccccggtaactcagaatagaaccttatttggaggtagtgtcttgacaaaggtaattaagttaaaatgaagttgtttgggtggaatctaatccaatatgactggtatttttatagaaaggggaaatttagactgagacagagacatgcatacagggaagaatgccatgtgatgcctggaattatgctgccacaagccaaggagctactgcaagttagcaggaaggcctgggacaggcccttctctagcacctgcagaggaagcagccctgtggacaccttgatctcaaacttccagggcagtaagacaaccatgtctgtggtttaagctaccccattcatgggactttgttatgacagcccttggaattgaatatgcttggtgactcaactcttatgtgctcatctagcatacagttccctctcatctccaagcctccgtttcctcatccctaaaatagaatccaaagcccctagctgtttaagggctctataattagaaagcttctgacagaaagtccccatcagctcctcccagtttagcagtaaacccatccacctaggtgtcctctaaattaggtaagtgaccctagaagaaagttccacacatcatctgaaccgcggataaaatgcatgcagaaatgactttattcaaattcaagagtttacattttacttaactctggaaaactcagagtttaaacattttcacatttttttttaaatagcaagaatggcatgccacatcatgatgattcagctctcatctctatttctctaggcagaatgcatttacacatcatccaatcccaccctatttccatgtactattagcagaagcaaatatcagccttcttcaggccctggcaggataaaaattcagcccagtagacactgggaggacaagaatgaggatgtgacttacattccccagggccatggcattcaaaaccaccatacccactgaatgtgcttctctatcgctttgtttaatatttggagagtagtgtttgctccaaaacttgtaaaaagtgagaccaatggaaaccattggtccaaagcaatcttacctgagaaacattttaaaaagaagtctttcccttatgattcctcttcttactctacttttttgaataaagagattaatacccaaccgatgactactgcaaggatgaaggttattctttaggagaaaaaaaaattgtaacatacatttttatgaaaaaaagatttctaaatatgctgataaaatcactgacatctcagtaaatatagtttattcctaggaagtgactagaatgattgatttagctatatgtaagttatttaatactgtttgaaaggtacttcatcaacaccatttactgtgatcaatagcattttcaggaacacttcagacttggggaggttactcctttgggtaaccttttaggattatctgttgtgggaacaagaagtagccatcaaaagccactgagcaggctgggtgctataatcccagcattttgggaggctgaagtgggaggactgcttgaacccaggggtttgagaccagcctggacaacatggtgagatcccctatctacaaaaactatattaaaaaaatttagcttgttgtagtgtacacacctattgtcccagttgctcaggaggctggggtgggagaatcacttgaccccaggaggtcaaggctgcagttagcattgcttgtgccactgcagtccagcctaggtgaaagagtgagaccctgtctcaaaaaaaaaaaaaaaatgtccctctaagcagttaaaataggtcaacatcaaagctcatggttctggctcttagtcaaagcctatttatatctgacataattctcatatattgcatatattgacctgtttggtttactaatccacattagaggccaacagtatagaaccagaatcagaaaatctattaaaaggaaatgaaagaataaaaaagcatggcaatatcaggccattaggtgtgggtacaaataatctcccaaaccacagtagtctctgagtgtttcactgacaaagtttagttatcgataattataattatgaccttgaaatcctagcgtagacattgaatactatgtttggaagtcagggaattgtttaatatatttaagaaagatattcccttcaaagcagttcaagtggtcttagtattgccagttaaggaagtgggttacaggatcctggaatgactcagtgatatagaaaggctcagtccctggcaatgtcagatgagtgaagaggttgatgcaaaagtaattgtgatttttgccattacttttaaatgtaaagtacaggcactaacatagtattagttactaatagtattagttatttagtaaattacttttgtactaacctaatactatgttagtgcctgtacaaataatgtgcagtaaaaacaatgagtgtgtgtgtgtgtgtgtgtgtgtgtgtgtgtgtattggaaagcagttgatctgtacacatacttacagtttactaaacaaatgtttgagtgcctactgtgtgtcttgctttggctgtgctctagacagtcatgataacagagatccctggtctggggaggtcccactctcagagcaattacggaagaagggtagaggaaatcatgcaagtatgtagggataggctgatgagagcggaagcatgagggctgagagctgcaggctgtcttcccactagtcagggaaggctttctgattaaagaaaattttcatcacctatgcttagaagtttagactcagaataactgatggcaaatggaaaagatgaaataaactaggatgagaagacaagactgcccaattcacacaatgaatccagtctctgaatcagtcgggtgctagccaaagcagaaatatttccagcagagccctgggaacagagaaggaggcagtttttattaaagtcttagtttccaaatgatggatgccaacaagaaaatagtttaaaattccaagagaagccttcacctttcattccattgtagagtaatggctttttcaaacacattcaaataaagccagggttgttaagtagtatgtctcaatcaacatactcaaagtctgtgaaccaaaggcatagtcttaggcttcctcttatagtctagcatgatattattctatttcatctttttttatatgtttgctcccttgagtgttttagaatgagactgctagattttatgtttctaaagctggttttctaccaggcctgttctcagaacattcttttttttttttttttttttttttttttttttttaagatagagtcttactctgtcacccaggctggagtgcagtggcgcgatcttggctcactgcaaccttcgcctcccgggttcaaacgattctcctgcctcagcctcctgagtagctggaattacaggcgcccaccactaaccccatctaatttttgtattttttagtacaaaatgggatttcgccataatggccaggctggtctcaaacacctgacctcaggtgatctgcccgcctcggcctcccaaagtgctgggattacaagcatgagccaccacgcccagcctagaacattctttcttggaaaggaagaacatcacagccttctgtgcattctcttgttcacccacataggcaaggtgatgtgtttgcagccttctttttaccctcacctctgggaggtggccttggctcatcacctattgtttcatgctctctcttaaaggctgatttggtgactgaattcatcattgctgcctacacacccatggggctagcctgggcaaaatgtgcctcgtaggttgcctgaccttttgccttttggcaacgtttatcacctctgaggattcagcttctttcgtcagaaagtgagaacttggatcaggtcatctctaaggttcctttcagttttaacctttcagaagtcacacaaccataaacatttggtgtacctagactgttggcttattgtccgactttaagccagtcatttcagttaaacaaacaaaaatgggggcttgccagagtcaagtcatacaagactgctttcctaatatttggtgcttcttaaatgaagttgttatttatgcatccctcaatcccctccctcttctgcatattttgaacttgcaaagccttctgatattttaagcagaaggttgcaaatgcttgtcctactgcctggccaagtcttaggtaaaaattgtcacctaaccacatcctcagatcatttcccctgtactctagatcactaagcgcatgtgcacacacacgcatgcacgcgcacacacacacacacacaccatccaggatcctcctgaggatgaatgaatattcctgggccaaatattgcatgaggatttgggcaatgttttggctagttgaacaacaacaatgctcatatttatgccaattggcaggaccattgcttgatcatcctgtacttggtgaagggcattttttattgtttccttttttgtttgtttgtttgtttgttttgtgaggcagaatatcaccctgtcccacagactggagtacaatggcatgatcttggctcactgcaacctctgcctcctgggtcctagcaattctcctgcctcagcctctcgagtagctgggattacaggtgcccaccaccacatcgggctaatttttgtatttttagttgagacagggtttcgccatgttggtcaggctggtctcgaactcctgacctcaggtaatccacctgcctcggcctcccaaagtgctgggattacaggtgtgagccaccatgcctggcccaagggcattgttttctaatccagataactaagctatccttagggtgatatgtaatgcagcaattgctagaaaatgacatgttttcataatggatctttctccaccatctagaaatttaggtaaagttgaaagaaaggataggaggaaccatttactgtgcacctactttcttcctgagattttatacatgtcatttgatgtttacaccaagtttttgaggtcaatctcatatccaaagctctaatcaattaactttaaattagttaatgacagggctctcttattcttaaacctgtcatttcccctaaactatgttgttttcctaaagtgagattaaaagtttgaaaacaaaggaacaaaatgttcatttatttactacgtttctgaaaacttgcatatatcttaatatatatatatatcttatttatatgtcttatttcattgttatgaaaacctagctttctttccttctatcctttcaatattatgctacttgtatttagtatttacattgtatgattcaaaatattgttcactgcagagccaagtagtagactatgaccgctctgcttattttgaacaatcttttatttttttctggagttgataattgcttcagatttttgtctggctttttataagcctgttgataatttcctgtttattctaatgtctgtcatatgcctatccatggagttaacctagtttcattttgtttttcatggccacatctttatcctcctttctgtgggggccctcagcttctgctttaattccagctagatactttctgctttcattcccgctatatactctaattccagctagatactttctgctttcattcctgctatatactttaattccagctagatactttctatgtgggctgcaaaggtgtagccctgatacttttctcatctatcatcctgagacttcatcttacaattaccctgttttccaaatctcatgccttctacttccttcctttactctccatttagaatatttttcagcagcttctaaattagcctacataagacataaactcttagatcttacttgtctgaaatgtctttcacatatgattggtatttgagctaaacataaattagagattgaaagtcatttctcttcagaattttgaagacttctctactctttttctttctgctgttgtttttgagaagtccaataacatatttctaatcctttgtattttgtttcctctctgaaaactacttagatattcttttattacaaatattctaaaatttagtaatttttaaaattctctcattgttttaaactttttttttgagtggagtttcactctttttgcccatgctggagtgcaatgacacgatcttagttcactgcaacctccgcctcctgggttcatgtgattctactgcctcagcctcctgagtagctgggattacaggtgcgcaccatcatgcccaactaattttgtattttttgtagatacaggatttcaccatgttggccaggctggtctcaaactcctgacctcagatgatctgcccgtctcagcctcccaaagggctgggattacaggcattagccactgcacccggcctgttttaaacatttaatggactcaccagggaattttcttgtcttattactttgataatttcctccactccattttccctctaatatttttactttcggggattcctatgagtttgacattggttcttctggactaatgtttcctctagtgttttttgaagatgtctttttggattaaattctagaaaccgcctcaactttatatttcattgttgctcttgatggttttaatgcagatactgaatttccaagagtgctttagttgttctcttagtgttcatttcatagagcacgttgttctcctttaagaggtcatatcttctctttaacttccaggatttttttaaccgttttgtctgttctttatattatgttacttttctctcatttgctccacttcctccccaccccacccctgtttatttagatctcttcctttcatagtgaaggttcttctcaattcactagctacctcaactgtccctttgtatttgagaacaaggcattgagaagcattattttggaagctctgtgtgcatgaccaggacttgtcaaagactggagcttatcacaaggggatcagatagaaagctgtcttttctataagaggcattcccaatgttagtgtctgcaggccttctagaactggaagcagaaagtccctcctcggcatgtagagtctcactcattcccgtttgcattccatcacctccctgccctgagccctttgcacttgtggtacatgttgtttgaagtatgatgcttcattgattagattccttcaggggtaaaatctccattctcgtgtggggaaggtgatactttaagtcacctggctgtgcagcaacagagagggaccaggtagtctaataacaccttatgcagacttccaactcttgtttctcactataccttattctataaacttctggggaaacggctttctttgaattctgagcctttcttaggtatatttcaggccaacttacttgtaccttgtccatacacttgtcaactggcacccaagttcaggcagtctccattttaatcaatcagctgctgctcatccacctttcattttatcttccaaaatattgttataattcttatgcattggttagcttcttttctttaactttgtccttgtggattactactcattttggtcttttattgttactttagtggcatttcaggaggaaatggaatggaagtgtgaggtcaatgcagcatatcaaccagaatctagcctgaattgcaactgtctcacaataggtgccggactctgcagttatggttctagatagtacaaaatttcctctctcttatgagaaatatgaaatcatttaaagcagttaccttttctaaacaattccatggactctgagtcaaaataatttggcaatcatttattccaacctctcctggatgcctaaactatatccctaagaggtgattttacaatcttgaattgaatctctccagtgataaggaatttacttacacatgaaatgattcattacattttcaagtcatgttgtggtaagagttagagtgcttctaagtatctttgttaactcctaaaatctgagtcttacaaataactgacttatcaagttgtaaaaagtaaagagaaaatccccatttctcctactttaaatagaccgtagaaaataatgatgtccaaatttgtcaaatacgtcaaactcaactgcatataggaccattggtgtacttataatccaagaagtgccaacacaaccatatggcatcagttgaagggacctcaagaagttaatgtggatttcacagtggcaaggctgatggctttagtcttgctgaaagttctgcttgtttgatgagaaatatttatataatattttcagaggcttatttcttgtatgtaaactctcagatgtgaaagggaattcatttgctgcatattgattagctcgttgagtgttaatttctcatggttgtggtctgcatgagagaactacaatcagctagagtcaaagaaaagtggatgcttccaccagctgatttttattttatttttatttataatatggaacactactgtaaaagaatctttgcctgtctttccactttataattataaagaaaaggaaaaaaagaggttagagggcccttcaaggtactttaaaatgtttttttcttagcaattcaaaatgtcctagtgaaacgggagagttccctgactcccttcacaggacttgtgacaggggtgtcttgtttatttggcctcagtgctcaaaccccttatgggatggggaacatgcaggtgcacaggagcagaagccagggtgagtgcttttgggctccagccccacagtggtgtctaggggtgttacaatgctcttttagccctgccatctggagatggcttaagtgttaaacagctcagtgaaaagtcagtgtgacagccttttggggttcccatacccagtgtgtcctgaattcttgttcagtgtccatgaagaatgaggtcatacagacctgaaggctggtgaatgtggggattttgttgagtgatggaggtggctctcagcaggaaggggaacgggagaggggacggagtgggaagatgatcttcccctgtagttcatcggtcccgtagctgatttcctctctgtccacagctaaactcctcttgaccttcagacacttcctctcttccctcctctgctgcactgctctgctgctctgccactcttctgcttgtggagcctggatattggggtttatatggatgggcacacgatagggggttgcagtgggtcaaaaggcaacatttgggtgcaaaaacaggaatgcctgttctcacttagggctgcaggtctacgcttgagggtggaaccctcgccaggaactcttttgcctcctgtccatatcactaggaagaccattgatgtgtttgatctttgtaaaactacatatgactctcaagttgcaagtgatactgtggttcagcttatcaaatactggaatttggcttctgtcactgactctgccactggctttgtggtcctgaacgcagccctgatgtcagatgtgttggtaatcttggggaactttaagcaagccagctttttttttttttttttttttttttaggactagatggaggtaagggaaagtgtgagacaataaaactggcaaccagaaacagaagaagaaaggaagagagaaaggaatctacggagtgtggaagttttaggagtaaatttctatataagttgcaaaattttagtaattctttagttcttatttcatttattcacttattttttttttctttttagacagagcctcactttgtctggagtgcagtggtgcaatcttggctcatgcaacctctgtctcccagcttcaagcagttctcctgcctcagcctccccagtagctgggactacaggcaccagctaactttttttatttttagtagagatgggatttcaccgggttggccaggctggtctcgaactcctgacctcaagtgatccaccttccttgtcttcccaaagtgctgagattatagacgtgagccaccacacccagcctcattcattcatttattcattcaacaagtattaattgtgtgcctactataggccaagtgtattttgggccaagtgcatttctatgagctaaggatatagcagggaataaaacagttacctccatcctcatggcacttacattcatgtacctgcaatccccatcagaatcagcaactaggaagagatgatatcagagcttgaacgtggatccagtaatacccatggatagttctgtggaagtaccacagagaaaaattcaaaggaaagaggaataggatatattgagatacaaaaagtgtagcaatggaaaatcaggtgatcagattattgagaatgaaatatctttagtaaagatttgaaggagttgagtagagatatctcctagatatctacacctacatagaagatcatgccaagaggaggagcagcatgttcaaaggagagaatgggtatgacatgtttgaagaatagtcagtagtttggtatggctacagctgactcagtgagatgggaatgaggtcagaaagatgaggaaagggcagtccagattgtgttgggctttgcttgcaaaaacttcagctcttacttggtataagacagcaaaccattgaaagagtttgtgtagaggagtgacatgatctgacttcttttttaacaagatggctcttattgtatcattaacagcatggttttacatgaacctatcgttttgtttagtttgtgggtcaggactgaacaatgaaagtagaagcagtcctgtgacagtggcactaattacatttattgtcatagagaaagctcatgccagtcacatactagtcagaggagttttcagtcctaattgccacagaacaaatgactttggatgttaaatggactatagtcccctcatttgcaaagtggggatagtagtatctatatagtgaattatgagaagtaaatgagaaataacatttgtgaaaatgtctgacaaaatgcctgaggtgttaacggatcttttaaaatgttaactgtagcctcaatggattgtaagaatatacacatttaaacccattgacataaattatggctagaatgaaagttttgatcatcttgatgatagtttttgtcttttgggtttctttcttgtgtgttctatctgaagaaaatcatctgaaatccctcatttagaaattgaaatattttatgtcagcaagcacatatgttaatgatttcctgaatcagaaatgtgttcaaaatcatatctatagcaatgatcaccacagcggtagttctattagggaaaatacacgaaaacaaatataaaacaataacaaattaagtaactaattaaataatgtgtggcatggaaataaatgaaatactgtgcaaccttcgaacaccattttatagaacaaataatcattggagaagtagacgtgatatgttgttaagtaaacatatcatataaatggcttagaggcttagagatgtgtaggaaaggaaatactctaaaatgttaacaagaatggtatctctggtgcaattaaaagtctttttaatttggatgggtttttttatattttacaaatatttctgcattgattctacattacttatgtaatcaaaggtgcccaatacgtgttacttaaagaatctcttcaataattagaacgtaggcactcaatgctcatttttttccccagtgattctctgaacgtgtgttactaccatccaggagcagaactatatcttgctgagacatttgtgataatgacaaaacgtttcaatcagaaatttgagataaggatatataaatgattttttctcatgagaaataaaacgcaggtgtgttcaccaaaatcctgctcttttactcaatccccttggccaaaagtaagcacgacctctctggcattgtgaacaaaaagaggaattaactcaaaaagactaattttatgcattagatgatcctttagaataatcaagcatatgagtattagggtaacttatcctttttacttttcctgagggaggtaagagtagcaccgacttgctactgctaaagatatggactattggcctgggagggtaagcattttctgtctgatttaattaagaccactacctgctgacaaggctttgagaaagaaacaaaaataaggaatgcacaaataaaatgtaatgcaggtcaggcatggtggctgatgcctaagtgggaggcttaggcaggtaatcacttgaggccagaagtttgagaccaggctgggcagcacaccaagaccatctctctacaaaaaaaaaaaaaaaaatacaaattagccatgtgtggtgatggatgtctgttgtccagctagtcaggaggctgaggtgggagaatcccttgaggccagttcaaggttacaatgagctatgatcatgccactgcactccagcctgaacaacagaatgagaccctgtctcattcaattctttaaaaatctaatgcaaaaacattagaactgaaactagaaccagttttattggaagatgatggaaaagcaccttgtgatttatctcttttggtagcagagagctcatgatcgtccatctaactcccacaccatcttggagagccacagggtatcctacattatcctgctgaagatccttcagtacctaatggctctcgtgaagcattccaaagtgaaagtcatggagcctatgccactaaatcagatataactagatacatgttggattaaaaggaaaggaggaaaggcatagaagggaaaaacagagattattggagaccaaatacctctataaattctcaaaatttgtttaaaggctttactttttcaagatgcatattttggcaatagcttacgaagactgaagttttcttatttaatcttagagatactaatacttagaaaagaaaagtcttctatcttgttgaccttctctgtagccatttgaaatcttcattatcagaataatgcccctccatgtccacaattattaatttttatagatttagggggtacaagtgcagtttcattacatggatgtattgtgtaatggtgaagtctcggctttttgtgtagccatcacctgaatatagtgtacattgtacgcattaagtaattcctcatccctttcccacaacctccacccttctgagtctccagtgtctataattccactttctgtgtccacgtgtacacgttatttagcagccacttataagtgagaacatgcagtatttgactttctgtttctgagttattcatgaccagaattattattctaattattgtgaaataaaaattatgcctgactaaaatgactgaatccagaacttcaccataatccatctatctcctccgtgagtcagtgcatattacctattccaatgacctcttcagtactgtaaatattactgtgttccttttatttacttaataaatagatgtcaaatgtgtggaaaacaacatttgttttttcaaatacatgtttataacaccctttggaggaagtaagcctctagaacatgacagtctctggggtatgctattttcaggtaattttaaatgtcgctttccaacaaaaatgcaatactattatctttttttttaatgacaaagaaaagcaaaacaagtattatattggtgcaaaagtaatgcagtttctgccatttctcttaatgccattactcgtaagggcagaaatgaccattacttttgcatcaacctaatacctccagattttagatatttgagtgccattgcttgatatatcttttgttttttcttctggaaattttggttactttagttgcataaaggatgacttccattttaccctgttaagcatctctgtctggtcagaagctactactctgttctttctagttcagtagggaacaatcagtttccttctcaattttcagctaatctttatgaatgaaatttgattaaatctagcaaaactatgcaaacatcataacagcatatggggagccttcctgtagtaccagtgggctatttccgtctaataacagattcaaaaaatccaattagacagtttgaaaaaagaaagccagagttaaaaatatctgactgtttgactgagaacagcagggaatggtttataggccaatcatttatggtgaataggatcttagtggtgagcaactcacatctctagcccattagaataatgtgttactcatattgctcctaaagctttctacttaattataccaagttaaatagcagacattctcactcccttttgatggaaaatcacatttattcacccacacaataccatccttgggtgttaagggatgagagttgacctaatgggaagacaaacaaatggtttaggaaatgagacatgatttttttacacaaaggttaatgcacgagaaaagaaatgcctaggtctctgtctaatgtctatgtgttctcatcgaataattcttaaatgaccctatttagtttgattttctaactacattagaaatatatgaaacaattaagaaatcattttttacctgtcatatggcagatggactaacattgatcagggcagtcgaggaggttgtaaggaaatgggtactctcaaacattgctggtgggactatgaagtgttttaattttttttttttttttagacggaggtttgctcttgttgtccaggctggagtgaaatggcgtgatctcggctcactgcatcctctgcctcagcctcccgagtagctggaattacaggcaccctccaccatgcccagctaatttttgtattttcagtagagacagggtttcaccatgttggccaggctggtcttaaactcctaacctcaggtgatccgcccacgtcggcctcccaaagtgctgggattacaggcgtgaaccaccgggcccagccaagtgttttaatttttaaaaactatttgaccatatgaaaatatagatgttccattaaatatatatagcctaagaaatataatcagcaatgcagtaaaagattatgtatacggatgctcctgacagttggatttacaatagggaaaagctggaaacaacctaaatatttgaaaaaagagaatggtaaatacatcaaaaatacaataaatacagtgttaagtgaaaagtttgtgcaattttgacttgagaaatttttaatgtactatgactacttggaagaatatggatgtacctcaaaataagtaatgatctatatgaaagactgtttttgataatttttgttttcttatacataccttccaatattgtccaaattttcaataataagcatgcatagcctaatatatcatgtagatgagtgcaaaatgaacacagagattaagatcatgggcttttcaatgaaggtctgagtttgaatcctgtctctgccatttactagcaatataatttcaggaaataacttaacatctctgctcttcagtttcctcatctgaaatataaggataataatggtatctgtgccttaaggatgaccaaagttatagatatcttaagaatgaattaaatgcgtttctctccatggactattttaacaatgaatgcctgacatagcaattatgttccataatcaccattatttatttataaaattatttagtattatttaatactaacattctggttttataaaaccaaattttaaaaatagataagtaaatgaaaggacaaggaaaacctaatttcactgtttttctagctttttttattgctataacttttatatcataaatccacccatttgaagtgtatagctccattttactatactgttttcatttataaaagccttttataaatttatacatacctttcagtgttgtttgaattttccatagcaagcattcatagcatagtatatcatgtagcagggtttaaaataagcatagaagagggtttcgccaaaagattatttaagaaaatctactaaaagagggttcttctgaaaaataaaatgtatttgcttttatcaaatgagcaaacttcatccacttggagatcacccacatgtgaatttctttctttctttctctctttcccttccttccttccttccttccttccttccttccttccttccttccttccttccttccttccttcttactttctttctctgatggtaagttacattagaggacaggaaggctcagtgatcagttttgatgggatggctgcacagaggcacatggagaagaagcaaggaagccaccttcagcttctgggtctctttgttatacaggaaaggaagtcaactggggtaaacctgtttggaaaggattgagtccttctctcaattttgaagggatgattttttagttcttcagatttatcttctgtaaataaatttcttcagaagcttcctgcaatatgataaacacaaatgattaggaagtgttttgtaaggattggggactaaagaaattattgatgaagccagaatgtgtcaaaaaggtgtcgtaaagcagcaatacttaaacattttggtctcagagtccctttacaatccaggacccaaagaggtttttttgtgtttgttttttgtttttttctaaaatgggttatacctatcatttttttcatattagaaattaaaactgagaaatgtttgaacacaggaatacccaagtacatattccagtgatcagcagagcaatggcatcatcacatcatattgcctccagaaaatcccactgacaatttgttgaagactaaaagggaaaaagccaaacaccttagtatgctgtaaaaacagctttcatctcacagacctcccgaaagggtcttgaagatccatgagcaatccctggaccacactttgagaaccgcttttgtaacgtgtgaccttcccttatcctctgccatgcgaaactatctcagaatctaagattgtctacagccacggtacaaccagctctgagactttgaagagaagaaaagatgaacttcatcactaaaaaagccaaagtagttgaaagcaaacactagctgaattttcttcctccaagcctacagaccacctcacgtagtagctgtagtgggagctgctcccaagatttgataagaattagtaaagaggtttataagaccgtgtgtgcagagtctcacagttgctgatacttgttgggcttagctttatctctgtctacagtagcagcccaggacaaaacattcatatgatattctctctttcttctttaaccatagataaatgtcccaagaaaagggaagagaaacagaaaaatcatacatgctaaacaccagtttattaaatatatttgttgctgtttttcttttttacttggttgctcacaatattaatacaccctctttataaaacatgaaagcaatacaaaagtataatgagtaaaatgagaatcctaaaatgttttcttccataatcctctctctaatcgcatttctcagagataactgtgttagcattttggtgtgtttcttatagccctttttgttgtcaaaaataagcaaagataaaggggaaagattttgttctgtttcttttttctatatacacagtatatcttggagatagtttcaagtgccaaatacatgcatttatttttttcacagaatgcaagtcatgtcatagcatggatgaagttgggtttatttaatcattcactagttggcaggtatttaggttgtttacagtttttccattttagaaacagtgttcccatgtaaagaatgtcccttgtgcataaatcgttgtgacatgtgttggaatctcaaaagtggaattgctgagccaggggcatcctcattttaaaatttaatagacatcatcattatcctctagcatgcacatcactttacacaactgatggtaatttatgaggaattctatgtcccctcactccaacactgcatctagtcactctttgaaaattgtccagtctaatgggtgaattatggcatcttgctttgttatgcatttctgtgattaccagtgaacttgaacatctttccatatttttatttatgtttaacatcgaaacacgttacgttttgaatattttcctctactctattactgccttttatccttgattatagtttcttccatcacacagcaggcttgaatttttgtgtacttaaatttgccaatcttttcatttctggttcctgagtttttttgtttaacttaggaaccacctcctcccatactatctccaaggatagaaaaatactgttttctcctagagcttttgtgaactttattttttacaattatatctttagtccattgatggctgtgccttttaaataatgaaaagtccatatttaagttatttttttcccaaatagataaacatttgccttacaggatttagtaagcattttatcctttcttcctacatttgaattgccacctttaacacagggatattaggtaacttaagaggtaaatgtgtgtttcttgaatcccagatctaccacttaaaaattatgtaaggtttgatttactgattcatttttcctgccccaccaacttcatgaccataaaataggggcaggggagaaggaaatgataagacttagcatattataccatatggaaattaaataatacacataaaatacttaaaatagcgtcaggcaatttaagagcactcagtaaagttagctcttattaaatttttgcaactccatgtatacctgggatctgtttctggtttgttcatggcagcattgtcaactaaaactttctgtgctattcagtgtgatagttattggacacaatgaccactgaaaacatggctagaatgatgggaaaattaaaattttaattaattttaatttaaagataaacagccacatgtggtcagtaagtaccatattggacaggagaatgcccatatagtattttccatgagctttcatgagttatgctttattatataaaccagattttatttaagaactcatatggactagattatgaattttatgagatgattttccttgagtcatcaagaagaacacagtttttttctttaatctgttaaagttgggaagtattaatataaatctagttcctacttgaaatcaacattccagcaataaaccttattggttcttgttattctttgacctcacggttaaatttgatttgctaattttggttagagctcttctatattcatatttgagattattttaaatttgcattgtgcattgactgtgagatgagtattttgttggcttggtaaaatgaattaggagacttcatattctaaattctgaaatagtttgaatattggagttattatctgttcttgggagatggtttttatcaccagttcccctaaactcctttttaccttgaggtaaagcaaagtctaccttactatttcttgtatggtgattggctattcaggttttctatctattattaagacaattttgaactcactggtgctccaaagaaaatctgaatcattctattacaaagatacaggctcacatatgttcactgcagcactcttcacaatagcaaagacatggaatttacccaaatacccatcattgatagactggataaagaaaatgtggtacatatacaccatggaatactatgcagccataaaaaggaagaagatcatatcctttgcagggacatggatggagctagaagctattatcctcagcaaactaacacaggaacagaaaaccaaacaccacatgttcttacttataaatgggggctgaaaaatgagagcacatggacacaggagggtaacaacacacactggggcctgtcggggagcatgggagggagaacatcagaataaatagctaatgcatgttgggcttaatacataggtgatgggtcgataggtgcagcaaaccaccatggcacatgtttacctatgtgacaaacctgcacatcttgcacatgtatcccggaacttaaaattttaaaaaaatttaaaaaaaaagaaaatctgaacttgggtagcaatatctctacctaatgatactcttgatttttaagtacttaaaatgagtctgaaactgtagaggaagaaaaattcttcctaccaccctcctcctttctctggctggggctttgtaaattggactgacaaagacagcttaacaagagagaagcaggagtttattagtgtgtgcattgggctcacacgtgggagcactcagacgtgagtaactccaagggctggtaagaccttgagctaatatagaatctcagcaaaggaacaataaatttttagagaaatgacaagacaaaggaacgaactttgagtttctagggtggcagactgtgggaaagcaaatatatgggaaacctattgtagataaagattagttagggaagtttatgtggatgcctgtggttccgtctctggactcctaagggtctagagttgtctctgatgattaacttttatccttcctagtagagaggggagggaaaacacctttgcaaatttgtgtcctgcttttaggcaaacaggggcagggcagagagcttttcttatagctgttttctctcaaaattctgtcttcacatcaaaataatcccaatgccaaagtggcgtattttggggtggcatattcggctaccctacaggacctatgcaaagatatatctttatatatatttaaaccatagttttcaacaaagttggaaacaagaataaggattgatttaaaagatattatatagccattgacatcatgctgcataaaacctatttaattctcatctaactggtagattatacaaataataacattgctttcctttggatattagcattggaaagagtgttttttgccagccttgatggtgcacccctgcagtcccagatacttgggaggctgaggtgggaggatcacttgatcccaggggttcgaggctgcagtgagctgtgattgcaccactgcattccatcctgggcaacaaagtgagacactgtcaatcaagaaagagaaaaagaaagagagagagagagagagaattctttttccttttctttcaaggaaaaatcagaaaatgagtggttgatcttagttcaattaaagaaaacaaaacaaacctgctgggtgcctcctctgctctaaatactaagcaagaaataaagtgaataagcccctgccagtcatgtaactaaactctgaatgagggaagtagctaaaatgttacacataaaagaaagctgaatgggaaaaatgcatggaaattatgagtttagggacattttcacttggccaaatgccccattctctttctctacttccaggtcattgtgataggtattttaaatgaacttgaataatcccttaggacagggttgcctgaggaaatgggggacacccagtcaaattggaatttcagataaacaacaaataatttttagcagaattgtgtcctatgcttacttatactaatatatatacatatattttatttgcctgaaattcatatttatctgcactatatctggaaacattaagaataaattgtaacatcttgtatttgtataaggcaacattttaccaatcttttcttcagaatactagttttatgaaactcagcaaaaagggctatgtggtcccaaaagttgagaaggcatttcgtgctatagctcctcttgcttacagctgttaacttggagtgataatcacctgttctgacaaccagcatagactggactccttctagctgttaacacctctgcagcaggactgagaaaggactggagagccacgtgctatggtttacacctctgagcatttgctgtgtgccagccatcacactacatgctttacatacttcatctcactaatcctcacacacttatgaggaaactactgagagtgtatgcatgaggaaatgcctcagagaggttcagcaacttgcccaaggtctcacagttgtaagggacagagtctgaatctattgcctctatacttaatcaataaagattcattatatgcattagctcatcaaaggttctaagatgtctagagtaaggaaaatttttgactttgtttaaataaccatttcctggaagcaccatcgaaaacattggtagttgcagggtgcagtggctcacacctgtaatcccagcaatttgggagaccaaggcaagaggataacttgagcccaggagttcaagccccatctggccaacatggtgaaaacccgtttctactaaaaatacaaaaactagccaggctggtggtgtgtgcctgtagtcccagctacttgggagtttgaggcaggagaattgcttgaacctgggaagcagaggttgcagtgagccgatatcatgccactgcactccagcctgggagacagagcaagactctgtctcaaaaaaaaaagaaaaataaaggtagggtgttttatatttatatctacataaatctatacattatctagatattatactatattatggaaatgtatatattatattagaattaatatttctaattatcgtatacagttatacattttattgtgttattataacatattatatataattggttctgtttttctgaagagccataaataatgcattcaatttagaagacaaactcttttagttggaatgagcctaataaaaataattaccatcccaagccaactttaggttattatttgtctctgacagtattaaattatcattatattaaattcctagaagcactatagaaatggcagcagagtatttatattatatataatataggttatattattagatattaatatattacattacaattgtattatcatgatattatatataaattggttctgtttctcttgacaaccttactaatacatccagtttagaacataaattctattagttggaatgagcctataaaaataattaccattccaaaccaactttaggttatcatttgtctttgatattattaaattattattattttaagttcctaggagcacaatagaaatgctggcagagtgtttatattaaatataatataaattatatttttagatgtaaatatattactttatgatgacattattgtgatatatatataatataatgagttctttttccctggagaaccttaactaatacatctagttcagaacataattctattagttagagccagcctaacaaaaataattaccttcccaaaccaactttagattatcatttgttttcaaggccatggttctcagccttagttgctcattaaaaatattcggggagggcaggcatgatggctcacacctgtaatccctgcactttgggagaccaaggcgggaggatctcttgagatcaggagttcaagaccagcctggccaacatggtgaaaccccgtctctactaaaaatataaaaattagccgggcgtggtggcacatgtctgtaatcccagctattttggaggctgaggcaggagaaccacttgaacctgggaggcagaggttgcagtaagccaagatcgagccactgaaaccccagcctgggtaagagagtgagaccctgtctcaaaaaaaaaaaaaaaaaaaaaaaaaaaaaaatacttggtgcacttatgaaagcctgcagagcccagaaattctgatttaattgatctaagaaaagggagaggtaaaagctcccaggaaagtctagtgcccagccaaaggccatgggagtgatgagtgaccctgcccacacctaacggagcgtcccctgctctgctagtcagtcaacagaacaccagccaatttctctaagccaagagctggttatttccaacctcccctggaagagtttacttaataccataagaagtcattttctcttccatctactgcaagaaaaaactggatattgcaattgccatcctttttgagttaaaatactctacatttttaaacaaataaataaaaaagcttaaccattttgaaattaccagtagggaagaaatcgggtgaaaaaggagaggaaccatgcattactgagaatactcctgtcccaaatctctctccatatccatttcttaaatttattcattcattttaaaaactcaacttacaattcttgaaatctttacctaggatatgtcagccagtattctagacatctggtatacatcatagaacaaaacagtcctgcccccatgaagtttcattctagcttacccctagtatatgccaggctctgaactaagtctaaaacagatgatccctgcccttccagctccctgcaaagccagcattaataataggagggctttttacagaaaatgaaactgtgacttgtttaagttacaacctgtgagtgttgaagtcagagtaccagtctttcctgtataccttaccacctatttgaaaaatgatggatagttatcttaaacggtgaagaattagtgtaagttcttaaacaaaatagtggcgatattaagatcatgcttgagaaacctaattcttgctgtctccttacatattttaagtttggcctaactctgtctctgtgcatagtgagctgtaatgtaactggatgtgtaaacagattgtagcctactcttgtgccaatctccaagttttggccaatcaaaggtggccaaccattcaaaccatgttcaagtaaggcaaacatcaagctgtaaccaacccaactatttttgtaccttgcttccattttccatatgtcacttttctttttctgttcataaattctctcctaccacgtggcatcacgggggtgctctgaacctcttctggttctggggctgatccattcatgactcattctttgctcaattaaagtctgataatttaatttgtctaaagttttccttttaacacgaccaagagtcacagattgcttagtctggagaagctactcttggctctatgcagtccacaaaaaatgacatttagaaatggttttccttccctggtctccagagaagcagcggctttcatactctgaaatgcagcatcctcatctgtaagatgcaggtgctaaatgatgactgttgttctttcaaatgttaactttctatgagtcacttcttcattgtatgtgtcaagaagcacaacctcgaaagcctgcctttgacaatgcttagaggttagaggatgccaaatgagcctcatcttctttggctactgagttagtaaccatccttcatttatctcagggagcaaaggcaggatttccgtgggtgtccaaggtccttactcacagtcaggatgcatggcagtacccttaataactacagattcagaatcacagaagacatttaccgagtatgtattttctgccaaaccctgtgccaggtgttattagaacattacttatgaaatatttggtagtgtggatgaagaggcagcttttcctgcttacacaatacagaaatatgatttcaaaaatctattaaaattttattaatctcagaaggcatgatttctaattgtgtttgatcttacacttgttatgatttaggaattcacatctgagttggttgcatgatgctatagttggcaacatgattctgaccgccaccatcacaaatagaggttagaaaatattacttatgtgaaaataaatgccatttctggcacctaaaacagctcttttctcaccttcctatgatgaggttttattgagcttttgcaggaaagaaaagaaagaaatctgcattcaggtttcaggagtaaagaggctgctcattaacaaagccgtttcaaaatctattgaaatgctccaccacgaatacatgccctattactaaaatcactgtcatttctatgcttttcttctcccttcaatcacataccacccagttttcagttcctataattgccaaaagccatttatgaatctgccttattgtatgggttacaaacgtctattttcctgctctgttcatacacatttgggagcaccttaagatgctgaaacactggcaaatgcttaatatatttcatttgaaagaattatgatctaaatcttaaagaaacagtgagtaaagtgcagtttctgctgcttggttactgtagttcattcggggaatttcatcttggtcgtgttgaatgcagtggttagatcctgtgaagttgtttaattaaaggtgttctagtagtcaaagccatgtctaaaaccccgtttgtttaattctttagtaatgtcaacattcctaaatttcatgtagcctaagagatttttccactggcttcaaatctgagctttgccactttggtgtcctttgctatgaatgttcaatgaggcgttctgagatcaccaagaatagaagagacacacccccggctgtcagaagtttaaccttggagaatgccatgaagggcaattctggaagaaaaaagagaagggaattcctcgtaggtttaagatcagaaagtggggaaggcgggggtgctcttaaatgcatcagccctactgccagcacagtggggactattaacacatcatattttttttttcctgcagttactcaaccttgcagtgggacaagttgctcaatgacttaccaggagacaattgttatttttaaaaatgtctttcttattttaactacaaggacttggcttgcttagaggctcttgctcaggagtctttaaatgcaaatgagggaaaccccaggttataaagcatctgcttctgcaggttttcaatcctgttaccttagcaacatttgcccttgtattccacgcatcaccttgacagcctgcataatataagggacggagcggagcaggggctcggggtgggagcctggaaagaaaactggggctcaaggaggtttaatatcggttagtagcttgggatccttcggataacggctgggcaatgaaaataaaaagccccatttccagaaatcaaagaacttggggagaaataaacacgctggttcaaaggaggggaaaatatatcagaactagtcggacctaagggagcagatattttccaaaaatatccttcccaccagccatgctgcagatgtgtcactgtggctcagaggcaggccatctgctgcagtgtttccctggaaacccccagcaacgcccctcccggagctcctccgcggtctcccccactccatccccgcgcagcggaggagcttgccggtgatgtcactgctgctagctgggagggaatcccaggacctgcgtccctcgggtagagccaatcatggtcggctctggatgctggaaacctggggcttttaaccagaaagaattgcaaaagcaatatgcaattcatcacagtccacaaagcacagttcctaacagattctgaaaacgtgattttaaaaaaaatgagatttatccgtaaacgagggctaggctacagttggtagggcggctgtcaattcttctacggagttttaacctacactcaatggatgcatgaaaaaaagaaatgaaatgatttttttagctactttaaaaaataaaggtaatgaatatttcttatctatatgcatatatatatatatttcattataattgttgcttctgcagaaaattgggatagaaatctcagatgagctgtagttacacggagatctacagcaatgcaatgtttagctagcatgcattttgtcatccaaggctagtaggtgaaatatttcctttacctgtcttgatgcacggtggagaaaggagacccgcttcgttttccctctaatctagagagttaacctcctccaggtagggttgaaaatatgaacagagctgcttttgcaagactgtgttgcctctaaatgtgatttaactcgcatattcagaatcttagcaaaaataaataaataaatagtaagatggggtaaggcaaatacatagatattttggagatcttatcccttattcaaggactgtagattattacagctttgttgtcatattatctctaggcagtaaatcatagtaaagtagtaaattcatagggaatgaattaatctcctttttgttttgttttctctgaaaaagagggtgtgattacagcatatattgattgggtactgattatgggacattttcattgtatttgttgttgttgcagtagactaaatgtcgagcccgtgaatctcttgtgttggcattgtcagaaaaaagttgtattttttttaaactggtctaaaaggaaaaaaattgaacatatatctttatattttttttgctctcttctcaaccatgtttagtgttttgtttatattcaaaggattttattttcacacttacaattctttacttgtctgtcattcaaatctttgttaccaaaacagtttgctctttttcatcattcactaagcattcctttcacagctaagctaaagtgtctatatggaaacatacatacacacacacacacacacacacacacacacatgcacacacactttttccaggccacagacaggaagatatgtgtaaatgtatacatgttttcagtagcatatatacacaagggtctccaataagatttttctagaaacaaaggctgatactacttcatttcatattattgtaaagtgctaattctaagtaaaagtagactaaaaaagagataaaaataaagataaaaatgagtgggctctcacaaccttgtttttttctttttgtttttcacttactctcttggctttttaactccttccttctctgcctcttatgaatgacaccaggaagagttattgtaaacaattggaatttctaaagttctgtgtaactgttagtatattcactatatgcatggtataatttataaaattaatctttgaaactgttaacccctagaaacagaaagaaagaaagaaaaaaagaaagaaacataaagaaatcttgacccactataaatcctgttttctctgccatctcccccagttacacccagggcaagtctatcttcttcaaagacattcagtcagcccacagctttttatcttttcaaacctttaatggcaccattagctacggaaccttgatttccttaatttttcccccactgtcactgcaaccatcacatgtggctctcagagcttctagttccctggaaacaggagttctatctgccatcaccaggtataaggtgccaccacttgaagggatctgccctatcaaaaatgaggaaatatattgatcaaaatggctggagaaagtgaccagccaaaacacagcttcacagtcttgcctgttttaagtagattctatttccattttgccggtgacagcactaagcaaataagcaatgttgccaatccgagaacagcctgcattcaaggtattcaatcaatcaaagagagacaatggcattctctcaaagatcagatgttttgtagtgcaactatgttgttctgtttttctttacttcaattatcagatagacaggaaaaaatacaacaaaatagcatgtagttgatttgccaaaaataaatagcaaagaaaaaacaagaataactagaaaacacgtgacaattttagaaaaaatgtaatcacatttccaattactagacaagatataaataaagagcatttataaaatgtttaaatccattcttttaaaacgataaacaacttctctaactggaaattactgtgcagctgctactttgtattttattggtataaaataactttagagttctatttcattgcattgcaaaggtgtaatactttgccataattaggtttaaatcttgcaaaaatagaaacctgcattttttggttttatattagtttttttaggtgatgctattcaatgggaggatataattgctgtttctatgaccttgggtaagtcatttaacccctctgaaccttggtttccttctttggttgaaaatagagacagtaatacttgacctctctctccagattttgatcaggttaaagaggccaataaaaatgaatgtgattttgtaaatagtgatacacacatctgatgcactgttgtgtatttttgcacctcctcagcagtgctctagctagtctgtccttgtccttgtcaactgtacgtgaacatgatgccctctagtgactgcactttgtagatgctgtaggccccaaggaagccttgagaggaaaaaagagcttaatgaagttagagaagggaagggaggcccgtagcggaaaattatgggttataaaccaataaaagcagcaggaaaaataagcagcagctgactatgagtaagaggacaagatgcacaaagagggagaagagaaaataagcagaatagagagagaggtgagatgtagctgattttggaagagttcactgtggcctggaaggagaggaacaggaatctctgcccagctttgtttataaccggcagtaggtccttccgttcatgtaagctctgccctccacaactcaccctgtgactgcaaaatgagatagttaaaattaaggttcagaattctttgagtcaatgtaagaagatgagcgaaaagtacaatgaaaatgagaactgaaggaggaagagtctgtggaagcaatttccagaatcttgtttactgtgtctaaggtcacctcagtattgcagtaacttaataacaaccaagcggctgaatgaggcaagctcaggtggggtttggtcgatcgcaggatgatcctgtactcttgtagtaacaggagtgttttgcagtacagctccacccttcacaaggatccagcccctgtgagattgcatcctcttagactgaatgcctaggagtctcactgactacctgtctgaagagctccttcttcttttctgaattaatccttctttacttagaactatctgaggatcaagtgatcttccagtgggaggatatttaaacccagcttccccttgcaaattacagatgctataatcctgtctgcattaggcttaggtcatgctttctctaaacgaactgtgtattacaggaaagtaatcaaagtccacaagaactgtgtaattaaaccagtgatggtgcaaataatccagaagtctgtcattgctctctctagacaaaggatcactcaaagatgagaatttgaactaattttactgaaagacaggatgatgcagctgaatggaaagaacactgcataggggtcagaaggtgtggattttcattctgacatggacatttgctatctgcctgatcttctgcaatattctaaacttaacaaagccttatctatacaatgggaattaatccatttattcatatatattaaagattttcaatgtgccaggcactgtgttaaacttccagatggcagtgagaaacaaactctagaatttctgagtcatgataaagatgaaacaggtgttatattttaaaactcgaaatgtcataacagtgtaaggtactatgcattcctaaagcaacataaaacaatagggatttttccaaccttaaagagcagcatttaaaattgagtcttgccttgggagcctgtgacccacgggagcattggaaatgacatcaaccacgaagtcttttttcttccagtgaaatgcaaaacctgctacctccctggagctattagcttggccaaatagtcctctagttagtaagtggacaaagtagttactgcacggctaactgcaactcttcatttaaatatttccctcatgtccagataggatatgtctaatatcatatgcctaatagcttttcagcatctttccacacagaaagaaagggaaataagccttgtcatagccatgaagtgtccccaccaccagagtttcttctctgctacccctatgctgcctaggaatgctaaaactattttatggggccaccaggtggcagttagggcaaatggttttagtttttttctttctacattcttggggaagaccaggggcttaggaatggagaagcaagccttggaaataaaagcattatggagcatttgggggtgccaggccctgtgctatatgtgatatatgcaatacctcacccaatccttatatcaatatctgttaaatatactattgaacaggtgaagatagagtaatatgggaaataaaacatcttccgtaataagcagctagaaagtaccacaatgtaaattcaactgcagaagacatgacaccacagggaaatttcgtttcactgcagcagtgtctaaaaactgaagatggggaaagtgtagagtgtgttattaaaatgattttttcaaaaggttttaagagtctaaataaattgcataattagtcagtttcctacctcctagtcttcctacctttagtctttatttttagctctcctgagtttgtagttgttctccttccatggtttgattctctccttagctttcagattctatacatttcacttctctttataaataatttttaaaaattcttcatgtgaacctgttcaagaacctgttgcattgaggactgaagatatggctctagattccttactgtttccggtagagaatctgcagagagaatatttcactgaagcaaaattataaatggaacatttgactttatatttccatgtccccaaagatttactaaacattagatctgatttggccaactttttctaccaatatttccggctcttgatatgaaactagttaaagctattttttcccttcaatcagcacattttcaaacttagaacatctattactcaaatttggcataaaattatgcagccagctcattatccactttctgcatattgccaagggctcgctacgtatgtgtgttctggttggcagacattttgggtaactactattctcaatttgtacctactttatttcaatacatgtttcaagatgagtgttaaagggtacattgctttaggaaacttgtctttttctggcatttgaacttgcctaaattagaaaaaaaaattctggttccagtcctttttttctaaaaaaatattccaaatcattagatgaaactgttaaagataacgtttggaaagtttgtctcctctttggtgattaaaaagtgctttccatttttggcccatggctcttttcctggggcatagcatttgattataaagcttttctgatgaaagtatcacaggacagcaaacatgagaatgggagaaataattttgcatgcaattttttgtcatctggctgcactgtatgggaaatacattttccctgtcaaaatgtcaagttgttttgacttcacaacaaaagaggaaggaagttcttaaatgtagaacaataactcagctcactgctgatttctatttgttctatccttacatcacagtatagagatagaatgtgtcctacaaatgtccatgcagcaactcatattcacttggcataattttgtttattgtttgagaaagtagtattttgggtaaaaattctgaaacaggcagtgagtatgtctgagtatttctggcaagggctatttcttcctttctccttttactctggagttttcttgaactgagctgtttggacaaatgacacatatttcaagaattccaactgtgggagtgtttcactcacaggattgtgctttcttctaagagccaggtctggtgaacactctcaggagctttgtaacatgttccaagctatgcagaagtgcttagttcattcactagtcaaagactaacacatttacagcaataaaatgcattataagcattctttcttcatgaatctattcatcccattaaaaaagcaggaattccaattaagtgaggtaaaatatgctaagtagtacagtataagatttttaaaaattacaccatgtttttcatggattattttaagaaaaaaactattttaagaaaaaactgtcctatttttggaaggtctagtcccaaactgcacaggaaagttagaggtaaactgttaaagtctttgagaactggcatttttcaagccgcagtgaatgaaatcaagcatttctctgtttctcctttcctttcggaatttcttttcctgaggcttgagaaggcaatactggtcttacttttcacatgagtcaagtttatactagctgagcaccctgaatcattaacgtctttctccccaggggagaccaagctcaaatccatcatcagaatacatacttagaccctctcccttctttctggccccctgcttcttaggaatgtgctctaaccaccacagcattcctgatcaccacctccagatgacaaaaagaaaaaatgagtggcagtgaaccagaagagcttaggccatctattttatcctaaaatctgttcagaaatacgaggtttgtatcaattagtaagcacactgggaatacaggtatacaagttgttagcaatatttggttatataatgtctatagatatttattttgctttctctcagatattaagaattatgtctttcctttaacctccatcatttgtttttctactttggtggaagctttttgtttgtttctttactgcaacagtgaatttatccttggatttctccattatgattggcagtatttatacaataatttcttggtattagttaattgataccttatatttactattttcccccaaagctgagtaaagaatagaatgaaatggcctatacttatcagtgtaaatggatattagaattgctgctcttattccaaaaaatatcacttaaagttcacaaatgaaagttaataactgaattttagtaacaacaacttcaacttaaaaaattccatgtaattaatagctcatgagtcccactgagataggttgaacttcataacttctaaagccttttatgtttctactacttttcagttctaatgttcaatagtagcgtgagtatctggttagtttcagtataaaaaagatgatacccacttgtgatatgattctactttcaatgtcacggtggaatcatttattagttttttaatttaatttttcacatgtgagtgtgatacagaacacctgatttttctacactataggatgtcagttcagtaaatcgattttcctcattagcaactgcttatcaatgactatgctgtatagaaagcaagagtattatactctatttttgatcacagataattgaagtaaatttaattagatccatatgaaagaaataagaactctcacaattgtgacatatatacgtgtctgtgcatatgtcatatcttagtatatgaggtatttgcatgtgcatacttaccaagttaaacgacctcctatcccacaaagttctctttagaaataaacttgagtctcttgtttgtgaaaccaaagagaatttcccgccaaagaaatacctacaaagaagtgtaggtaaagaattcaaatgattgactcaggcttaagatgatttgatagctctttctgcaccaagaaacacagaaaatctcaaagcaggcctgtgccaacttggtataaaaaaagccttcctaaagagtgcattatcttcaatgggaaacgtcgcagtacaccttggcatcaccaggtcaattagtgcaccggaaagatgcatgatatttcctgttggcagccacgaagtgagagaattggacggctactagccctgttgtgtgccaaggcctaaaaatcatgcaaggaggtgaaatgatgcgtgccaagaaaatagcaaccacaggaaacagcaaataatgtaaggttttgtgtctttactctagatgtaaatactcatttaccagggcagctttaaattgacagcttttgggtttgtgaggatattgtgagtcagggttctcctgattgggcaagatgaacgagtgaacaacatcactagggggccggagtagatgagatactcactcattcgtgtgcctgctttagcaccagcagtgtgggaatggggagaaggccaatggtctcaaggcagtttccagctctctggcaaacaagataaggccatggctgtaacagacaccctctgccaggttctaaaatctctctcttatgacctttttaagatctttaaagcaccgtctgcccttggccaacaaaagagaaaaaacagagtcaatgcggaaaacgctgccaagacaacattttcttcttaagatcctaaaagcaccattttccctttgctaacaagacaggagcaataaagagtcaattaggaatatgttgccaagacattggccatataatttctactccagtcggttttgggtttgatgcagtttagaattctctagacacattttttcatttttttttcttactagaacgcagaatgtttttgagagtagaggtggatggcactgctcattagaaatagctgtcctgccccagaacaatcttcaagacaaaggttgcaagactatctttgaccttcctgtccctaaacactccccaaccccaagccaaacacgcgcctaaaagttttcacaccttgccctttactaacagcaatcatatttaggaggaatatattattgttagtcaggaaattctacctggcttcaggaggtagcttagtgggtatttgctaagtctgatacctttcctttcaacatttagctgagattacctatactaagagcacgaactacaactgtggaaaacagaagaaaggagaatgttctccaaatcaaagtgtgctaaggtcagcttggggcagccaacaattcctggaaggtgacagagataaagttgcagagagggaaatggttgaagacaaatgtctcacgccttaaaatgttgctaaagtaagatggctgtttggatgagtcatcaacaagaacatcacctttgctctcttcctgccacccctgcacttctcaggctactgctcctaaaacctagaactcaggagtgatggaaatagagggcacccatggcaaggaagaaattggagagtaggaaactcagggaagttaatcctgaggaaagtggaaagtgactaaaacattttgagcagagaaaagtcaataaatcaaatatagaaacaagagatgataggaggttctcataacagtccaaatgagaggaccaaaaggcctggagtcacgtcattgcagtaaaatggaagaaaaaacaagagtataaatgaagtgtcaaagatgttaagaaacaggatcttttaaaaaattatttttaattattatgggtacataataagtgtatatatacatggggtacatgtgaaattttgatacatacaatgtataataatcttatcggggcaattggggtgtccatcacctcaggcatttatcatgtcttatattagaaacagtccaattctcctcttttagctatttgaaaatatacaataaattattgttgagtatcatcactctgttgtgctatcaaatactagatcttattctttctatctaactatgcttttgcacccattaaccatccccaccttctccccatgctggctatccttcctagcctctggaaaccatcattctattatctatctccatgaattcactaggagaaataggatttttgactaatgggtcagaagaagcaaaggaaaggaaaggaaaggaataaagaatgactcaggtttcttgcctaggaaattggttaaaaaaagggtatttttaattaaaaaaggagagttgaataggagactaatttgaaggagaaaatagcctatttttagatgtattaaatttatcaaatttgtgtgctgtatatcagggctcaatcacaattctggcataaatttatatattttatagaacattattaacttgaaagaaatgcatgtattttgttaattgatagaaacaagatcaaagggcatattatattattattccgctttgtaaggaaaaataggttttgcatatttatataaaaagggaaattgaatgtgatatactctggggtattaataataattgtgaattaaattcctttctttagtttatattgctgtctcaaatcttctgatttttctaccttgaatgtaaattttttgtttgtaatatggcactttaaattaaagttgtttttcagctgggcacagtggctcacacctgtaatcctagcactttgggagaccaaggtgggtggattacctgaggtcaggagttcaagaccagcctgaccaatatggtaaactccttctctactaaaaatacaagcaaattagctgagtgtggtggcatgcgcctgcagtctcagcaactcgggaggctgagacagaattgaattcgagaggcggaggctgcagtgagccgagatcataccactgccctccagcctgggcaacagatcaggactccatctcaaaaaaaaaaaaaaaattaaattaaagttatttttcttttcttccattacccagactggagtgcagtggcatgatcacagctcactgcagcctcaacctcccaggctcaagtaatcctcccacctcagctttccaagtaactaggactacagatgcacatcaccatgcctggttaatttttgtaatttttgtagagatgaggttttgccatgttgcccaagttggtctcaaactcctgacctcaagtgatcctcccacctcagcctcccaaagtgctgggattacaggtgtgagccactgcactaggccttaaaatttatttttcaaaaacttgatgattcaaatcattgaagatgctcttatgccaaagaaaaggtagttctaggaagttcatggaatcttacaaacacctttacagctcaacagaattgcaaagatgggtagtgttttgttttgttttgtttctctgattgttctacagcttatagatactgaggttacattttatgaaacaaaagtaagaatacatgatttaaaagtaagatcaattcctaaaaattggacctgaaaattttatggatagagtagatagacgtgtagaattcatcccagcatagagttgctgggatattactggtgcttcttcacagggaaagaaacctggctacccagactacaaagggaaagggggaaaatggcctataactcatatcaggtgaattagcaaacattctcatttcagacgatttttgctgtccctggtcatgaaatttccttaactgggttctatcttttactttttatcccaggcttttagcaagggtcataggaaaatggccatttccacatatctggtatatcccatttgaagatattgcctaacaaacattactcaggatcccttacataaaaacctccatgataaatttcttctgtacttttttccccaaaaagctggattctcctgtaaaactgttatctattctctttatatattataattatggaattcattatcatttctactcttatctacatgactaggtcaccaacagctaattatatagctaattcatggtagttaattttatttacttctcttaagtcatgacttacaaaattgcatttctatgtatgccatcttattacctccatttatttaagttgcatactacttcacatttcctttgaagtgtatattattattagtagtagtagtattttggagacagggtctcactctgttgcccatgctggagtgcagtggtgcaattatggctcactgcagcctcaaccttccaggctcaagctgttcacctacttcagcctccccagtagctgggactacaggtgtgtgccaccatgcttggctaattttttaaaaatttcctatttcttgtagagatagagtcttactatattgcctaggctggtcttgaactcctggacacaagcaatcctcccacctcctcctcccaaaatgttatagacgtgagctaccacacccagccatgagtgtacattataaataaataccaataatgtactttcacatatgaaaaggctataaaagtatgcaaatatattatggcaacatctgttaagggataaagtgacacactgttgctcataactcgaaagaatatatatatatatatatatatatatatttttttttttttttcttttgaaacggtgtctcactctgtcaccaggctggagtgcagtggtgcgatctcagatcactgcaacctccgcctcctgggttcaagtgattctcctgcctcagcctcctgagtagctgggactacaggcatgagccaacatgcccagctaattttcatatttttagtagagatagggtttcaccatgttggccaggttggcctcgatctcttgatctcgtgatccacccccccatcagcctcccaaagtgctgggattacaggtgtgagccattgcatccagcctcaaaagaatagtataaaccttatgtgttcatataagcagtagaacctatccctaatagttggattttattgtgtaagtgtttcattaaggaatgtctgaaacatgtccagatttttatttcagtggcttagttttgccacagaacttcagttttataaatgtgtgtactggcttaactgtgaaagtattaaaattattgtattgatttttgcttgcaaatgaaattcataaacagaattatcactgaaatttacatgcaagagaaattgatcaagatgatttgaaaacttatggaaagattgaaggttgccaaaatctttctctttctaacttcctacctttatgtacatttacactctaatcacaggtatttacaggccttaattttaacgaaaatgaagaaaaccaagaaagaaacagctctttagagcaatggaaaatcttctatgatttctcactgacattggctagatactctgcatttatgagcaatcatgcatgtatatcatcagatttaaccttcacaacaattccatatatattatcagatttaatcctcataatagtttgctatcctaggttttagtttagaaaactgagcctcccataagctaagaagttacttgtccaatatcacaactttagataatggtagacttagattaaatccatatttgctcgctctacattccatattcttcccatttaattgaacaagattttggaataaagttgaaatccacaaaaggaataggacagtgacttcacaataaaaatattaaatgtggcagaaagtatggatgtcaatggaatgtaaattctgggcctcctcaaaaacttgatatactcatcctgtgttagttgtgaaataaacaggttggagagtgaggaaatgtggtttttgttcccagagtcattactgaccaactgtgtgctttgatattatatttgctttctgatactaattatattaattctcgctcatagaaatcttccctccttcataccccacctctgtttgattcttaatctcatacataagaggtttttattcaatgtctcatttttctttccaggacaagtatgttgtaagaattaattaatagtcttagaaccattcaagcagtaggttctaattgagtatttttctccccggttagcacagcaccctgtcagagccctcaaagtcagacaaagaaggatgaaacatgttttggtccttaataaagaactgctgattgactgtttgaaaaacaaatgccgcacacctgtaatcccagtgctttgggaggccaaggcaggaggattgcttgagcctaggagtttgagaccagcctgggcaatatgatgaaacctaatctctacaaaaaaaaaaaaaaaaaaaaaaaaaaaagagccgggcatgaacctgtagtttcagctacttgggagactgaggtgggaggatcgcttgaaccctagaggcagagttacattgagctgagattatgccattgcactctaccctagggtgcaagattctgtctccaaaaaatgaaaaacagctgtatggtttggagagccagtggctgacaaactgaaggtcatggctaacagagtctccatatcagtgaatctcaaacatctgtttacataaatagcatcttcttataaaaaaatacaaattctgagcccccatcccattatagttggtaagtctaggatgagaccagaaggggtcattttaatgagattttcagatgactttgaatttatatttaatatttattctggtttgcctggggttgaagggttccccagggcatgagactttcagtcttaggcaaactggaatagttggtcactcagatttcggtgcagtggttaaagttaacactttcaaaaatattgtagtgatctagatttggttctaggagtttggctcaattcagggctaacaaaaaaatctgtttagggccacttggggattagtgattctcaaaaggtagtccttgaatcacttactgaatacctatagttgaagaacagataactgcattttaacaagattcaaaggcaaattaatgtttgatgaccgttgacatcaagtctcagaatcagaactgttcaacttccaagcaaatgaaattactaaactcacttctctgagtgaggctgagagcaagaagttaagtataatgttttttgagctaaaatacagagtctactatcagaatcctgtttcccaccataaggattaagatttttttgtttttgtgtgtgtatgtgtgtgtgtgtgtgtgaatgtgtgtgtgtgtgtttgttttttgtttttctgaagtgaatgacatcgttttttggaatgaaaaggtcttgccccaccctgcaagtgtatctctgcctttgagacaatttagccctggaatcaaacctgggggggaaaatcaaattatgatattaaagaaaacgctgacaaatttctaaattcctttcctctactccctgctgcatacaacttccttctttctatctataaatactatatctgctctagaaacgtgaaaaataacataaatattgaacagagtgtgaaggaatttaaactttattgatgagtagtagtattacccttctggactgatgcagatgagagcaccataaagacaaagtgagttcttttggtccttaagccatgaattggagtctggatagtagggatggaaatgggttattagatcatcagttcactttcctctccaagcagcaattaaatttgttttctttgtctcagcttactcgttgctcaaaaaaaagaaacatttcagctcctcttcatggggaataagaccaaacatagaacacttttctcttaacatgtgtggtgcttgagaggagaaagaggcaggaaggaaatgcaggagaaatgtgggaatcacagttaacctgaaggattactttggctgtccccttcagctaatgtgaacattctggcagtcagatgcagccctgtgagaaacatctatcagacatcctaagtagatgctccaactgctgtttttcatgtacagctgactccaagatgagtgtgatgctatcacggtgcaggataacagagatgtaccgcgaacccaacactcaagatgggaatgataaaacttcaataacaaaaacaaaaaaacaaaacaagccacactatcctttcagccttcagggatcgcctccttaaactgttttctaaaatctttctgcactttatatcaggtgcaggagaagtagactacatacattatttgttgtctatctttgaaaggatttcattccctctactgcacttaatcattcccttatctgaatattaactcagtgtaaagcttcccaaattttccaagttcttgaaagagagcaaaacatattgcaaagctctatatgtttcctgctagatatatttcgtgaaagacttcattatgtccactttcttttgagtttttgtgttagccctgcattgctataatttccaacatcccctggaacataatgaaaaccagagaattgctttttttttctgggtccattttattacattcttttacatctcttacttaactacttctaatgcctttgctctgaaactttgtgcatttgagggtttttttttccccgtgatttggtggactgcaagggcacacaaaactagcttatttttcctagtcaggcagttttgaatagaaggtgattgtgttttccagagataagtatgtaagtcttttctgctaccggaggaggattctattttagtagtctattaagtagacaataagcgctgagttatgagttgataagtggatctgcttaccacctagaaacatcaattgaaaccacagcttatggtttcttactgcctctttttggtttctcactgagtctttctggttattgttatcatttcgtttttgacttgggcttggactgttcagcttggctgtgttaatttttcagaatcaatgacttttatagttacttccatgagtttttcctcctgcattttatttaagcaattcactaactatttataagaccatctttgaaagcctgagatacatatctaggcaaatatccatggaaaaaataaacactctgcaaatttgcaaacaaatacagcaattgccaaagtagggttatcttttgcaatcagtactgtggtttcagtttgaaaaaataaagctttcttgtcagttttgctccaagggctatctgattcggtgtgtagtcggtgaggaaataaatacaggtataataatctgtgcttgctcaaaaattaaaaaatcctttaggagggggccaggcgtggtggctcatgcctgtaatcccagcaatttgggaagcagaggcagacagtttacctgaggtcaggagttcttgagaccagcctggccaaaatggtgaaaccctgtctctactaaaaatcttagctgggcttggtgacatgcacctatagtcccagctacttgggaggctggggcaggagaatcgcttgaacatggcggagattgcagtgagccaagattgtccagcctggacaatagagactctttctcaaaaagaaaaaaaaaaaaaaacctttaggaaggataaaactcatttcctctatcagcatagtgtcaccatattacagaagtatcaaggtcaagtattaagactactgaggctcaggtgtccttggctgaagggagagagaggataccattcttgcatagtcttcagggcagcagtaatcagcaaactgataggttgcttctgggtctaaacccactgtaatcatttgcttgtagagatgacaaagttatcagttgtacttacatccactttttttgttgtttcagaagcttaccacacttctcccagtttccttttaattagtttgtaattttaaatcattacattaagataagaggtttttattaaatttggtagaactcatggtaggtcctacagaaatcactgaacttggcagccaaaaacagtgaccaggctgaggatgtgcctgaattgaacagggagatgctatttacttcttaacagagacatacttttcacgcagaaacttggcaactggaggagaaaaacacagaggtgaaggggaaagaagactattctggaaattaacaggtttcaattttggttgttcttcaacttgttagctatgtggccagaaataagcctcttaaactctctattccttggtttcttcacccactactctaaatctgatgaaacagagcagtaagaatttcttaggatatagcttaatttatttttttttaaaaagctcaatctaaaaacaagcttaatttaaaacagagacaaacaaatatgcctaactttgagttttgacaaaaaatgcaaaagtaattcaatggaggaaagatgagctttaaaaaaaaaaaagtgatactggagcaattggatatccaaaggcaaaaaaaaaaagtgcctaaattcatttctcacatcttatacagaaattaactcaaaattgattacagacttaaacataaaatgttaagcaataaaactttaggaaacaaacaggagaaaatgatgaggacctaaagctaggtgaagaacttctagacttgatactaaaagtatgattttcattttaaatgaattttaaaatgaatttcaatgaattttaaaattcattttaatcaactgggacctcatcaaaattaaaacttttgttctgtaagagaccctgtgtaaagaattaaaagaaacactacagagcaggagaaaacatttgccaaccacatattcaagaaagattttgtacctagagagtataaagaactctcaaaactccacagtaaaatccaaacgatccaattaggaaaatgggcaagaaacataaacagaaattttaccaaagatgatatacagatggaaaataagcacatgaaaagatgttcaatatcattagccattaggaatatgcaaattaaaacaatgagatagcactatctacctatcaggatggctaaagtaaaaaagagtaataataccaattgctggagaggatgtggagaaactggatcactcatacattgttgatggaaatgtaaaatggtacactctgtaaacaatttgcttgcttcttataaaactaaacatgtatttaccatatgattcagcagttgtgctcttggacatttatcccagagaagtaaaaacttagactcagtaaaaacctgtacatgaatattaatagctgttttatttgtaaaagccccaaactggaaacaacccaaatatccttagatcagtgactggttaaacaaactgtagcacagctatactatgacatactatgaagcaataaaaaaggaatgagctattgatacagacaaaaccatggatgaatttcaagggaattgtgctaactaaaaataagccaatcacaaaagatttcatgtgatgtgattttatttatataatattcttgaaatgacaaaaatatagaaatggagaacagattagtagtttccaggggtcagagagtagaggagggagggaggtgtgtgtgtccataaaaacgttgcgccagggatcctggtgaggaagctattctgtatcctcattgctggtgttcacgtgaatctacatatgtgataacatttgatggaaccaaatacacacacaaacacacacatacacatatgagtgcatataagaccagagaaacttattttggtggattccgtaaatgtcaaatctttggttatgatattgaagtgtagtttggcaagatgttactattggggaaaatagtaacattgtactattgtcctgtgaattattgattcacaggaaattgtaaaaaaaaatgctttgtcctatacatttttttagaatttcctgtcaatccataattatttcaagataaaaaaagttttgtaaaggaagaattttagagactctttcagattttttattttgagatttaatcaattatatgagaaaaataagctttaactgaccactctttccttcctatccaaagcttagtcaatgagaaaatgttgcaagagaaggagaatggggggtacctgagactccaggagagtacataccctttttaaaaaagcaatacaagccagcagaaaaaggaaagatgggactctggagcgattatgtgaatctgtggttctcaaagttcagcatgcatcagattcccagagggcttgtttaaacaaaaatttctgccctgcaaccacagagtttctgattcactaggtctgggggtggtgggtgtggttcaagaatctgcatttctagaaagttcccatgtgatgttgactccagtgctgatgctgctggtcagaccacactctggaaactactgccatagaacatctgagagtcacaatttgaaactgtctcaagaaatttctaagtaaaatgcaatgcaataaattacttaagaattctctatatttacaactctttatttgtatagtttccttccccctcagtatgttggctggtaagaatgttctttttgattattcatctgtgtgggctcaagagtgtgtcactgagttaatttacaaagcctcggattgcatatccatcacatttgtagaaagtattatcccagaaaaatccatcaacacaacacataagctccaaaatgtactgcacaattggcgtgcaatagagtagtcaaagaaccaatgaaatgcaaaaagttatctatatggagatctcaaaatgaattaacaaattaaatcctttgacattgtatgagatcccattagggttcattgttacagttttctttaatgtttctaaaatagaaatgttgtcctgggcagagcagtgtaatgtacttgctttggcatcaaatgccacattttttttttttttgagacggcgtcttgctctgtcacctaggctggagtgagtgtgcagtggtgcaatcgtagctcactgtagcctcgaactcctgggcttaagcaatcctcccacctcagcctcctgagtagctgggactacaggtcccaggtgcccagctatttttaaaattttttgtagagacaagtcttgctatgttgcccaggctgatcttaaactcctagcctcaagaaatccttcagacttgtcctcctagagtgttgggattacaggtgtgagcctccacaccaggcattgtttctattttaactttgctacttacgagaagtcttaatttgaccaacaactaatgtaagctctagtttccccatatgtaaaaagaagataatgcctaaattgcagggtttattgggagaattaataagaacacgcctaggccaggcacaatggctcatgcctgtaatcccagcactttgggaggccaaggcagctggatcatgaggtcaggagttcgagaccaccctgaccaacgtggtgaaaccctgtctctactaaaaatacaaaaattaggggagtgtggtggtgggcgcctataatcccagctactcaggaggcttaggcaggagaatcacttgaacccgggaggcggaggttgcagtgagccgagatcgtgcaattgcactccagacttggcaacagagcaagactccatctcaaaaagaaaaaagaaaaagaaaaataagaacacgtctaaaataattagtgcagtgtctgacacttaagttctcaaatagtggcggtgaagatgtgaaggagggtagagatgactgtgattattaatcatcttatttgttgatcatattaaaatgacaaaaaccacaattattttgcaccaacctaatatttcagcagatgtcctctgaatcagaagtaaatagccatgataatcttaccattagttattttattgagcaattacaagtcccaggctcttacgtttttatattaattttttacaaccagtttatgcgatgcatactgtcctcatttatcatataaggaaactaaaacttaaagagtttaatatattgctcaaggttatccagtgtattggtttgctagggctctgtaacaaagtaccacaaaccaggtggctcaaacaacagaaatgcattgtttcacagttctggcgtcaaaaagtccaaaatcacagtgttggcagctttggttccttctgagggctgcaagggaaagattgttctgggtccttctccttggcttgtagatgtctgtcttctccctgtgtctctccatgtcattttttcctctatgcatgtctgtctctgtgtccaaatttttccattttaaaaggacattagtcattgctgggcacaatggctcacacctgcaatcccagcactttgggaggctgagagaggcagatcacttgaggccaggagttcgagacgagcctggccaacatggtgaaacgtgtctctgcaaaataatacaaaaattagctaggtatggtggtgcatgcctatagttccagctatttctactcaggaggctgaggcatgagaattgcttgaacccaggaggcagacgttgcagtgagctgagatcatgccactgcactccaacctgggtgacagagtaagactctgtctcaaaagaaaaaaaaaaaaaaagggcattagtcattggattagggcccaccctatggaactcattttaacttgatgagctctgtaaagaccctatctctaaattatatcacattctgaggtgctgggaggtaacactccaacttatctttattgaggggggcagaattcaaatccatagcacatagtagtaagatgtcatgctgaggtatgaaccagacttcatacgcaatgctgtggactaaacttttgtatgcctgtgaaattcatatcttgaaggcctaatctctactgtgacggtgtttgagatggggcgtctgtgaggctttaataggtttagatgaggtcaggagagtgaagtgcttgtgttggaattagcacccttataagaagaaaaaaaggccaaagcctcctctctctctgccacctgaaaatgcaacagggaatggccatccacatgccaagaaatgggcccttatcatacaccaagtcttcctgcacattgatcctcgatttctcaggttttggaactgcaggaaatcgacgttcattgtttaagccacgcagtctatggtattttgttatagctgcctgagctgactaagacaggcaatatatgacatggccgtttgctccaggacttttaggaaatgtggatcccattggtagtgctcagcaatcaaatttatttgatcctcatgttcagcagacatgttgtttttttcttcatgtattgccaactcttttatatgatacataaaacatattgaaaaacgtagacttgctatctttatattccacatgttggcagattctttccaagaaaagtgattttcagatcattccttaggagcgttgaggctgagaagtggtctttgcatatttatatttagaaattatcgagtccaaaatctaaatattgagtcttggtagaagagaaaaccagtcacaatttatgtaaaatagttgttcctaggtaatgaaccaaagcagggactatatttgagaagtagaatggtattgtcaaagtcagtgtacaatcaggaaattaaagagattattttatccaaactattgcagttaatgaggaatgtctcaaaagaaagggaagcagggttttatagatataggggaacaaaaagtttaagggatttcttaaccaccacttttttctagaagcatagggattaggtcacattcaacattttcagtccccacttctacttcagatcaataaacattataggatgctgaacaacatagaggtgatcatcagaaacctgagtaagactgagcagggtctaagaaatagtctctcaagagttcttgttggcattattgtcgtaacatcacctaaaccagctgttgagaagtagtggcaaaggccagttgtttcaaagtcatagagatcaggctccttaaaagagaagtatttaaaatgaaaaacattaatatcaaagattatgttaaagaccagagtttaaccctgagcataccagtccagcaaattccaaaaggtgggtggggaaaatctttcagttacacagtaccgttcgttgagtttcttgaagctaggatgtcaatgttcttgatgatgttcagtctcggttagctttcctctaagagaatgaaggacctgagcttttcaccagaatttgttaggggctcagacagtggtttgtgcagggaaaagtctggcctgcgtgtaatctgctgcagtggtgagttcttcaaagtttgaatcaagtagttggacttcagctggcagaatttcttcaactcctggagaaaagagctagctgctagacaacctagagttccaacaggaatctgggcaatcagatgttatttttcagtgacatcaagttagggaaagagagaaaaattggaaacattaatttgtagggttgtagccagatattgaagcaaactggaaggcttcacagtttggtacaaattaacaatttgggcaagataacaggatccagttcaatttttaggaaggtgtccaaactgctttttccacaaaggaggggaagtcatttaaatcattccagacaagtcagaatttgcatatgtatcagttacctgcaatttatgaaactgtataatatggctaagagataattatgtctacaatctgataaacaggaaggagctgcttgctatagttttccactgaaacaaaacatttctctctatagtcacccctcttttgatcaaaaataatctcaaagaaagattattcttgatcacaaaataaagctagtaccatcagatttggcctgattatttacattgttgtcttaaagatgataattcactacatagggtttcttatatttgctttgctgaaagttttcataaggaatctcaaattgaatttttaaaaaccacttgaggctaggaagctatatcaagaactcaccaacagatttacctacagtatctataaatttcagtaaatgcctctcttttagaggtcccaaaaatatctcaagttttctgagcctgcgaggaagtatcctttacctgtaaatttgggcacctcattagccaggaatcaggctgattttcccaagagggctttaaatgagcatacctaatgtttccaatatttcatgcaaacaaggaagagttttattgaacctatgcaaataactataattttgaaatataatgagaatactcagtaagaatttctgatttctctaacagtcaggcaggaagaaaaagataccaatgacaaatgtttcatttatatttgcaaagcatagacttctgaattgttatgagtttcagttagtttaagagaaaatagaaagaagtttcctatgtccaaaaaatcaaccattaaaatatcagcaatattccaaacaaaagctacagtcattcctcatcagttccttcagtcctgtgtaattcttgctctgcttcctcttggcttaacagtttcatgcatacatctgcctctccaaacagggctctggaaatcctgactcagtctgctggtatggtctcaaggttgtgtaagtgacggcatcagaagcttctgccccaaatgaaaagtacctggcatagagctttgccatggggctctgagataatcctttgttaagacaaagcactacagctagatttgtaagagctttcagggaagcaccacaaagcaaaattctatttgtaaatgacaaaagccttaaaaattactttgaaaaatcattttcaaacgtgaaagatgtaaggagtgtttatcacaagaatctccatttgaaaaatactggcttataggcacagaaaaacaaagatagtatgttctcacttacatgaggaatcttaaaataatcacactcgaagcagatagaatggcggttacaggggatgggggtggagggaatggggaggtgatggtcaaaggctataaaatctttattaggaggaatctgtttttgttttttgagttctagtgtacagtgtggtaagtgtagttaataataaagtgttgtacatttcaaaattgggaagagtaaatttcaaatgttctcacacaacaaaatgactagtatttgaagtgatgtcgttaactggctcaatttaattattccacatggtaggcataaatcatattatcactttgtaccccatatacttacaatatcataaattgtcaatttacagtttttttttaaaaaaaaggaaagcactggcttagaagaagctaatttgaaattaacgaataaaagttgttaccaagttaacattttaaaaataactgaaacttatgactcatgtggtgctctctaataacagggcaaagtgacatcgggactcaaagaaaaacacgttatggacataaaagcctttgatgactctctaggaattttccatacagcatacaatttctgaaatatttatactgataacattctgcccatacagatttgtcctagggaaggttaagcatctcttctgagttggcaatgactcccgtgcaatttgtaaatagtaacatatcaaataaacctaattcttttcagcaactttcttttcataaggtgaaataacaaatcctttgtgattttcaaaggccctctgggagatatcaaagacagtttcagatgcaatagatatcacttaggaatcagttttgggagggaaaatatcaaaagttgtcaggagattgggacactttactaggatacggtcgtgagttactgataaacaatactttgctaccttaactaaggtgacagcaaaaagagtgaaaaagtaagcacaggcagtaacatgattgtaaagaatcttagctttttcaaaagggagaagactttattaaataagcaaggacgtgataaactcaatacacaatataggaagttattttaagacatggaatctttgccttctaggcagattactcagaaggtaaagaaaaaatattattaagagtagactaagaagtcaagaaaatgttatgtttttaaacagaggcaaaattaaattctactttgcatcattatggcatttgatattaaagatctttttgaaatcttataaatgaattcatcaagccttagctagcactgaccacagcaaagtttgtttcccacaagcgttttacaactttctacgtctattcagcttttgtcctacacattaacaactagctatatgacttcagaataaaatgactctatttttttcttaacaaaaacatgttctgcaaaccttgcatacaaaattgtatctctctgctattattatgccttgtagaatctcattcatgtatattgattataatttttaaatagaaatagtaacatctgttgcacaaagaaaaaagggaaatggataattgtgatctttctgtcatacataagctttttgtaacacactagtggaactcatgaatacacatctcacaacttttaatagccatgcatattatttacagcacgacttatgcaaagtggcaaaaatgaacacatttattaacaaaactgaatgtacatgcttctctatagcatatagaaacaaaaggcaaaaaagtatataaacttaaaattatgcttggttaccaatatttcacttttctctcttgcatagaaattacataaatatccaattaatattcattaattaattcaatttagcttcaatccaaggttttaaattaccaaatatcttggaatttgtcttcaggctgacatgctccaaaatattagtaccattgaaagtttgttagaataatgactcaatttgcttaaacacaaatttttattttctattgtattaaacattaagtagaagtaatgctaggttatttggttggtaaatctaagtttaggaagaacattcacaagtagaatagaagcatacttgtgttatatttaacactaaaaactcagagaaaacagctatttttactaaatcaacctcattaattgattatcaaaataataattattgttaaatattgtttgccaaacatttacctagattttgtgaacttgaattattgtctctgagttatgttcctacaagagacagctttttcccctacagtaaaagtgtttaaggctcaatttcctcaacttctgggaatttgggaaatatttggtttatataaatggttatttatttctaagccaattagaatagagctcctttaagagattctataacctaatttagcgacaccatcctgaggtagggaaatattttatttttatttttttcagagatgggctagattagaactcctgccttcagcctcctgagtagctaaggttgcaacttccatagtagctgaaattgtaggtgcatgccaccgtatctggccaacagggaaatattacatactctaacaatgagtggtgacttcctttctgaattacagacatgtagacattaaagcagagatagcaagaatttagtttccattctaacatttaagccatgggtcaagagtggacacagaatcacaaaacttactgtttcatatcaaagagctgttctgttctcatgattcttaagtgatttgagctcaaaacagacaaacagaaaagcgtagcaaaccaaattctctgttgtctttcacccataagatacaagatctctaaaagtcattaatcccctctcagagatcaccaagtggtcagaccacaaaaccaaagccagtgccagaaatcaagtgagtactaaaaccttgccttgctaccaatagacaagggtccatatcacaggaccaggagttagacttattcatagttccttggaccaggaatggagcacaaagggcccaaataagccttattacctgtgttgagtaaacaaagatcccagtgcaggagatccatatcatggcaccaaactatcaaatacaggatgcactaggtcattaaagagaagattttattcaaagcattgcaaaatggagaacattgatttatggtgaatatcttgaagaaaaggaagggggtctggggttctataggggcaagaaaaaacgggagtcatccagaagtcttataaaagtcatgaagaagggtggagatgggtcttatctcagaatatgggaaggcagtttgggcctttgcattagttgtttgccagacactaaagggtagagaggtttcttaatcattactcttttccggaagcacagggctcaggtaagattgaatatttttcatgcctttcatcctctctgtctgatctctttcaaactgtcttttttgttgaggctatatgaaatgtttactgttttaccttccaatcaactccataaaaacggttgatataaagcatctagccaagttccactacattttagtcattcattatggaacatcatcccaaggaaggctttattctctctgtctaagcaagcaatgaagggagatcttttggaaatggcctagtatttgatgagaagcaagaacaaggtctacattagtggatcacagactttttgccactgagatccaccatcgaaaatgcattcattattacctctgcatgtgtttatttaactgcaacaatagtttaatgattttcataacacaaaacttcacagtgtatgatgacactgataccttctagtctattcccagctgttctatttcatttttttatagcttatagtgactcattaaaatggatttccacgaatgcaatgcaacacacagtttgaagtccactggaaaatcttttaaaactgttattataaaatgaatttagtaaccttttcaaaattttactagtgtagtttctgtggtttttaagaatacaaatattttgccttctggtcttttttttcacacaagtatatggcagattcctataaatattttaatagatcagcagtttccaatgccatgtttcggtgatgatattttaccagagatagtctgtaatgaaaaattgagacaaatgatgacaatgtaatttgcagacatgtatacttatttataataaatttgtagacatgtatatttagttagttattcaacaaatattcagtgccttttatatcttaagaatggttcatgttaattggaggcaaacaagaaaggcaaagttactgcttagttgaaatttacattctagtataaaaattgccatatttattattattattattattatacttaaagttctgggatacatgtgcagaatgtgcaggtttgttacataggcatacgcttgccatggtggtttgttgcacccatcaacccatcatctacattaggtatttctcctaatgctatccctccccgctccccccaccccacaacaggccctggtgtgtgatgttcccctccctgtgtccatgtgttctcactgttcaactcccacttatgagtaagaatatgcagtgtttgtttttctgttcctgtgttagtttgctgagaataatagctttcagcttcatccatgtccctgcaaaggacacaaactcaaccttttttatggttgcgtagtattttgtggtgtatatgtggcacattttctttatccattctatcattgatgggcatttgggttggatccaagtctttgctattgtgaatagtgctacaataaacatatgtgtgcatgtgtctttataatagagtgacttataatcctttgggtgtatacccagtaatgggattgctgggtcaaatggtatttctggttctagattcttgaggaatcgccgcactgtcttccacaatggttgaactaatttacactcccaacagtgtaaaagtgttcctatttctccacatcttctctagcatcttgtttcctgatgttttaatgatcgccattcaaaccggcgtgagatggtatctcattgtggttttgagttgcatttctctaatgaccagtgatgatgagttgcgtttctctaatgaccagtgatgatgattttctcatatgtttgttagccgcataatggtcatttctctaatgttagctgcataatgtcatttctctaatgaccagtgatgatgagttgcatttctctaatgaccagtgatgacgattttttcatatgtttgttagccacataaatgtcttcttttgtgaagtatctgctcatgtcctttgcccattttttgatgggattgtttttttcttgtaaatttgtttaggttccttgtagatcctggatattagccctttgtcagatggatagattgcaaaatttttctctcattctgtaggttgcctgttcactctgataatagtttcttttgctgtgcaaaagctctttagtttaattagatcctgttcatcaattttggattttgttgccattgcttttggtgttttaatcatgaagtttttgcccatgcctatgtcctgaatgatactgcgtcagttttcttccagagttttatggttttaggtcttatgtgtaagtctttaatccatcttgagttaatttttgtataaggtgtaaggaagaggtccagtttcagttttttgcatatggctagccagttttcccaacaccatttattaaatagggaatcttttccccattgtttgtttttgtcaggtttgtaaaaaatcagatagttgtagatgtgtggcattatttctgaggcctctgttctgttccattggtctatatatctgttttggtaccagtaccatgctgtttgggttactgtagccttgtagtatagtttgaagtcaggtagcttgttgcctccagctttgttctttttgcctaggattgtcttggctatacaggctctcttttggttccatatgaaatttaaagtagttttatctaattctgtgaagaaagtcaatagtagcttgatggggatagcattgaatctataaattactttgggcagtatggccattttcatgatattgattcttcctatccatgagcatggaatgtttttccatttgtttgtatcctctcttatttccttgagcagtggtttgtagttctccttgaagacgtccttcacatcccttgtaagttgtattcctagggattttattctctttgtagccattgtgaatgggagttcactcatgatttggctctctgtttttctattattgatgtataggaatgcttgtggtttttaaacattgtttttgtattctgaaactttgctgaaattgcttatcattttaaggagattttgggctgagaagatggggttttctaaatgtacaatcatgtcatctacaaacagagacaatttgacttcctcttttccaatttgaatatactttatttctttctcttgcctgattgccctggccagaacttccaatacaatgttgaataggagtggtgacagagggcatccttgtcttgtgccagttttcaaatgcttcctgtttttgcctattcagtatgatattgcctggggggttgccataaatgactcttattatttttggatacattccatcaataggtagtttattgagagcttttagcatgaagtagcattgaattttatggaaggccttttctgcatctattgagacaatcatgttgtttttgtcattggttctgcttatgtgatggattacgtttattggtttgtgtatgttgaaccagccttgcatcccagggatgaggctgacttgatcgtggtggataagctttttgatgtgctgctggattcagtttgccagtattttattcaggatttttgcatcaatgttcatcagggttattagcctggcattttctttttttgttttgcctctgccaggttttgctatcaggatgatgctggcatcataaaatgagttagggagaagtacctctttttctgtcatttggaatggtttcagaaggaatggtaccagctcctctttgtacctctggtagaaatcggctgtgaatctgtctggtcttgggcttttcgattggtaggctattaattactgcctcaatttcagaacttgttattggtctattcagggatttgacttcttcctggtttagtcttgggagggtgtatgtgtctaggagtttatcaatttcttctagattttctagtttatttgcgtagaggtgtttatagtattctctgatggtagtttgtatttctgtgggatcagtggtgatatccccttcatcatttttttattgtgtctatttgattcttctctcttttcttctttattagtctggctagtggtctatctattttttaatcttttcaaaaaaccagctcttggattcattgattttttaaagggtttttcatgtctctatctccttccgttctgctctgttcttagttatttcttgccttctgctagcttttgaatttgtttgctcttgcttctctagttcttttaactgtgatgttagggtgtctttcccactttctcctgtgggcatttagtgctataaatttccgtctacacactgctttagctgtgtcccagatattctggtacgctgtgtctttgttctcattggtttcaaagaacttatttatttctgccttcatttcattatttacccagtagtcattcaggagcaggttgttcaggttccatgtagttgtgtggctttgagtgagtttcttcatcctgagttctaatttgattgcactgtggtcaaagagactgttatgatttccattcctttgtgtttgctgaggagtgtttcacttccaattatgtggtcagttttagaataagtgagatgtggtgctgagaagaatgtaaattctgttgatttggggtgtagagttctgtagatgtccattaagtctgcttagtccagagctgagttcaatggaatatccttgttaattttctgtcttgttgatctgtctaatgttgacagtcaggtattaaagtccccactattattgtgtgggagtctaagtctctttgtaggtctctaagaacttgctttatgaatctgggtgctcctcatattgggaatctggttgctccttgtatttggatgtgtatatatttaggatagttaactcttcttgttgcattgatctctttaccattacataatgcccttctttgtctttatctttattgatttgaagtctgttttatcagagactaggattgcaacctctgctttttcttgctttccatatcttggtaaatattcctccatccctttattttgagcctgtgtgtgtctttgcacgtgagacgtgtctcctgaatacagcacaccaatgggtcttgactctttctccaatctgccagtctgtgtctttaattggggcatttagcccatttacatttaaggttaatattgttatatgtgaatttgatcctgtcattatgatgctagctggttattttgcctgttagttgatgcagtttcttcatagtgtcaatggtccttacaatttggtatgtttttgtggtggctgttaccagtttttcctttccatatttagtgcttccttcaggagctcttgtaaggcagacctggtggtggcaaaacctctcagcatttgtttgtctgtaaaggattctatttctccttcacttatgaagcttagtttggctggatatgtaattctgggttgaaaattcttttctttaagagtgttgaatattggcccccaatctcttctggcttgtagggtttctgcagagaattcctctgttagtcttggactttcttgaagaaatgggcttctctttgtgggcaacttgacctttctctctggctgcccttaacattttttcctttatttcaaccttggtgaatctgacgattgtgtgtcttggggttgctcttcttgaggattatctttatggtgttctctgtatttcctgaatttgaatgttggcctctcttgccaggttggggaagttctcctggataatatcctgaagagtgttttccaacttggttccattctccccgtgactttcaggtacactaatcaaatgtaagtttggtcttttcacgtagtcccatatttcttaggggctttgtttgttccttttcattcttttttctctaatctcgtcttcatgctttatttcattaagttgatcttcagtctctgatagtctttcttctgcctgatctattcagctgtcgatacttgtgtatgcttcgcaaagttctcatgcagtgtttttcagctccatcaggtctttatgttcttctgtaaagtggttattctagtaagcaattcctctaaccttttttcaagtttcttaccttccttgcattgggaggagcttgttattacccaccttctgaagcctaattctgtcaattcatcaaactcattctccatccagttttgttcccttgctggtgaggagtttgtgatcctttggaggagaagaggtgttctggtttttggaattttcaggctttttgcactgatttatcctcatctgtgtggatttatctacctttggtctttgatactggtgacctttggatggggtttttgtgtggatgtcctttttgttgatattgatgctattcctttctgtttgttagttttccttctaacaggcctctctactgcaggtctgcaggagtttgctggaggtccactcgagaccctgtttgtgtctacggccataccaccctgaatgcgcccgatctcgtctgatctcagaagctaagcagggtcgggcctggttatacttggatgggagaccctgtttgcctgggtatcaccagcagaggctgcagaacagcaaagattgttgcctgttccttcctctgaaaactttgtcccagagggacacctgccagatgccagctggagctctcttgtgtgaggtgtctgtcaacccctgctgggaggtttctcccagtcgagagggatggggatcagggagccacttgaggaggcagtctgtcccttagcagaacttgagcactgtgctaggagttctgctgctctcttcagagccggcaggaaggaatgtttaagtctgctgaagctgcacccccagctgccccttcccccgggtgctctgttccagggagatgggagttttatctataaacccctgcctggagctgctgcctttctttcagagatgccctgcccagagaggaggaatctagagaggcaatctgactacagcatctttgctgagctgtggtaggctctgccaagtacgaacttcttggtgctttatttacactgtgaggggaaaactgcctactgaagcctcagtaatggtggacacccctcccctaaccaagctagagtgtcccaggtggacttcagactgctatgctggcagcgagaatttcaagccagtggatcttagcctgctgggctccatgtgggtgggatccgctgagctagatcacttggctccctgactccagccccctttccaggggagtgaacagttctgtctcactggcattccaggtgccactggtatgaaaaaaaactcctgcagctagcttggtgtctgcccatatggtaaccagttttgtgcttcaagccatatttcttttattggaaaatatagaacttttccttctcacattcaacttcttgagaggatctctttgataatgtgttcatgtacacagttcacatcaaatatatataacatgtggatcaaagtgttaagatattcttctttacatatagtgttagtagctgacgatttttttttcttcaaaaataaatttggaaacttgtcagtccataatttttttaagtattattttactatctcatgaaatctgaaaggctagaatacactagataactcttgatttccactcctaccctgccatgaagtgataattcacatctggctataacttcataaaaggggcagggcgacccacttcctaaaagaccactattgacttgaagacctgtgtctcttgtctcacttctaaaagtgatttaaaactcaataactcactctgaaatccactgtataagaaatagtaatgtttagggtcatttaaaagaaagattagtttaataaattttggcaccctgtttaacatataaaaccatgaccatgtgttaagtataaccatattttgtgcagaatgtgattcaaaagactgatttaatagctatagtccaagaagtgttgaaaactcttgcccagtttatggtttccaatataggacacatatcaacagaataagaaactcaagaattaaactgatgactgtgtcgacctctggaggaactcttttttaagacacaaagccaaattttcaccttcatttatgcacactcatctcctgaaggcttccttatgcatttacgtgtgaaggaaggagaggatttgactcagtctctttgtctgtcatctttcttcctctctcattctgaaatagcttttcacagttgaggaaaaaataaagatttgaccttcccacagtgaatgataacaatgataacagctgatctttatatagtgtttattatatgacagagatcatttcatgcactttgcttctaagaactcatttattccttacaacactgtaagtactgttatccccattgcacagacaagaaaaatgagcttctgtattagtccattttcacactgctataaagaacttcctaagactgggtaatgtatagaggaaagaggtttaattgactcacagttctgcatggctagggaggcctcaggaaacgtacagttatgtggaagaggaagcaggcatatcttacatggtggcaggtgagagagagagagagtgtgtgaaggaggaactgtcaaacacttataaaaccatcagatctcgtgagaactcactcactatcacaaggttttttgcacagacaaaaccacccccatgatccaatcacctcccactaggtccctctctccacacatggggattatggggattacaattcgagatgagatttggatgtgggcacagccaaaacatatcaggtacaaacaaatagtggagttaaaaatcaaacatggaccatctgcctctgtagtccaggcccttaaccactacattatataacctcttgagagaggaaaacttagattgggcaatattagcatccaattgccagtgcaaaaggaaatggaagtcagcacaccagcttattacttacccgagatcaataagagacctgcaaatacttgactccgggttatagacttggtaaatccaaatgatttctctcatgaatccgaatccctgccagtaatgcagatattctaacttgagacttaccttccagactgaaaatgccaaatgagaaaaaccaagtaagtttgagtttctgcagttacaaagtgctatggtttgaatgtccctatcaaaactcaggttgaaataaaattgccattgtaatggtattaggagatggggcctttaacaggcgattaggccatgagggctctgccttcataaatacattaatgtcattattgcaggagtgggttagttatcacaggagtgggttagttattgtgggagagggttcctgataaaagcataaatttcacccccgtccactccatcttcagtgctcacttcatccttccaccttctgccatgggatcaccatccccagatgccagcatgatgttcttggacttcccagccccagaaccatgagccaaataacttctcttctttataaattgcccagttgatggtattctgttatagcagcagaaaacagacaagacataaaggaagacacataattaccctcccccaacagttcatgttacccctcaacattgttttagtcagtgcaagactaccaaagtataggtgtctgaacatcagggaaatgtaaatagagaaggtaaatgaattcaaccttccttttccctatactctcatttctgtcaaatataaaaacctgtgggttttacccttgttccagtttacataatcacattccaaattacttatgtggacttttatgagggctttttttctttacacctctctccttttctcatcagcctctgcaatcagctttatacaagagttatatttcattcatttcattttcttttctttctatttcacaagttctgggacttggctgtcaaccgaatcttgaacttggtaattaaattgttcataagctccaaacatgttgtaactcatgtcatattcatgtacacttctctgccccaacttgataaaatgagtgatactgggacaccattgtcatacacacctccaaacctgggtgtgtccacttcaaatgcctgaacttgctcaaatagaaatgggattactaaaacaactatatatcctcaccatgctggttttagtaggaaagatgcatcaaggataaagctctccagtgaaaagcatggggctgaaagaaggaagtctctctgaggcagaagtcctttggaaaaactgaagatgacgtcctagataattttgaagtcttatgtagcaacagaagtttatgtcattaatttagcaaatagtcatagacaaaacatgcaactttagagcaagtgccaggctgtgccaataattccacccttcacctccacatggggtcagtccatagaacaaaataccaaaggccttagtgctcaggtcttttgctcctgacattctcccttcatcctttccctatccccacttatccttttttaatgcactatagatgagtatgtcttaatttcttaagttaatttgcattggcattaagcacctactttatttatttcctttctcaacaactctcagactttgattcttcatgtccttccagggccctgccccatgccttctgctaaatgctaaagtcatgcaacagtttagtactgcgtagagtaggatggctagcaaaaggaaatctctcaaaggagcttcatgctctctgtgactcagggtagcagtatatggccttcggcacccactgtgggctgggctatggcagactttgcttgccctcattgctctctttgctttccttgatcttgcccctgtctgtcttcattttctcccttctcacttttttccctattgttacttacagtttaagttatggaagaaaaacacttaatgcttattggccactggaggatacacctcataacttggaaaatgaaaataaacactttaatagttttgtacttgatatgatgactcttttaaacaaaacactttttatctaggcatgaccttagatttatgggaaaagaaagttgcaaagatagtacagagagttcctgtatacctgtcttctagcttatgctaatgtggaaaacttacataagtgtggcacagttgtccaaaaaataaattcacattggtataattctattcactcaaattcagactttactcatatttcatcagttttttcattattatcctttttcttttcccagatctaattcagaataacacgtgtgttactacatgatgatttaaaatgtttacaaaaacaagacctctacctatgctcctattagtgtgtgtgtgtgtgtgtgtgtgtgtgtgtgctggtgtgtgtatatctttatttaataataaaactagaagggcaatgaattcgaaacggaggcttttcttactagcctttttaagatagacattgctgacacatggacagggattgaattagtacaaatattaaatatcattaagccttcttttttgagttctgtctgcacatcaacttcacctgaagaatgtttgtaaaatacacatgcttgttccccacccaaaatctattgaatcagaatctctagggagtgaggaccaacagttgcgcttttaacacctccactccccccttgtattggacggtaaaggccagaaaagattaccttaggcattctcatttcagaagctaaaacagacattcaattttctataccctaatttgggacttatatctgagtgttaatatatgcatgtaatactttgtgatgaatgttaaatgtgttttaatagtgttcccttgcagaatattctttcctttgccggtattattaagactatcttgcattgggattcatgcccccaggcttacagttctctgagctatacttgcatacactgtcctcagtgaacctgggctttggatccagatcgccttgaattcaaaccctagatctgccacttaaagactcaagaaacttacataacctttttgtaattgttctctatctataataaatgaaaagtattactaattattacttacatgcaagattgttgtgagcgtaaaccacatgatgtgtggaaggtttggggcacagcattctttaccaattcagggtaaccctgaaaacttaggaaaaagagaggattcatataaatcacaaattttgcaaatgcattttaaatcctctctttgttccagctccttgtacagacaggactgcttgctactaagaatttccaacacaacctccaattaaatagttctttgatgtatagtgggtacagaagaagtccaacttatttgcatttgcagaatcaggagacccccccaaaaaatgctggaggtgtgaaagcaagaatcagaatttgtcaggattctccgtaaagtactagcggttttgtagatgctttgcagctgtggaactataaacactcaaccgcagacacctcattttatatctcttctatgtggtatatttcccttgtgaaaatgtgtatttttaaaattcactctgcaaaatgacagtcaatgttatcaaatatacatttatatgcccttgattgtaaaacccactacaaagtttattaccttaagtttaatagaaaacaattttgaaaaatgggaaaaaaatatatctgtcacagggaagtggttagaggttctaacagaggagatttcttgttagaataatttgttgtattttggttatacattttttgtttttctttcgaatgttgaaaaagttaagaatatattaatacatggacaggttagaaaatatgtaaataataggttggtcaaatcctgcagatgacaaatcatgagagtttgccaagctaaggggccctggccactcataccatccctttatctaactcttcctcctcatccagtcccataataaaaaatattaagcttgcacgtggtaccttctcttctaggctacttgttaatgggtcctcttaattggctatgtataaaataagattcccatgggcagaaatctttatctgatctgttcatggacatatccaagtgtcaactagattttggcacacagtagatgtttggtaaatatgtattgaatgaatgacagacactgtgctccacattgtaaacacatcatatcatttaatcattataacatccctatgctatcccctatgtgctattattagctccatggtacagacaataatcaggatagatcaggaaactaaccaaggttacacggacagtacctagatggcaggaggccccaaagcatgtgtactaagcattatggcacactgccttcctgtctggcattcttgggacatgcatgtgtgagcgataaggtaagtccaggaaagcgtggggcactgggagaatgtagaagtagggatgatggaatttcatttccacagtgagagccccccatcctgctcccattgtcagacccgcactttttgttatctcttttccttctgtcttgctacgtttgctttgtcttcttcctcgatagtttcccaaagactttaaacgactaactatcaaagaagagaatatatgtgaagtcactagttacttttctgctcaattagctatatatagattaactttttaaaaaaatattttccccatacacccactcacataactgtgaagcttaggaaaaatttcaagattatcgtgggtgggccccatataaatccccacactgtcaattctcccagcagctgtttcttaattcgtcatcagtgtagaaatctaaatcagcactcagtgaaatctaaaagtccaaaagatttatttcaaatttcaaacctcctccctaatgttctgaggctgtgtcaacacaggtagagagacggggagagctgagggtatttaagaatcacataatgtgagaaactgaggagaccctagggatcttttagccctaccccctcatttacacataaggaaatgggatctgaggccaacagcaaacttgcctgcctgctatctgggaagttctattaataacacactgtcatgggggaaaaaattcatacaggtaataaaggtttgttattttcaaagattaacattctttattaattaccacttttttgaaactgacacagccacaaaaaactcctgtataagaagaatttgtctaataaattgtatgattgtttattgggtatctgtttattttcttaatttttaattgtctgtcaatccttcttgatttaaagtagtcacataaatatataaatgtaaagagttaatataactaattgaattcatttgagggaaaaaaattaaattttctttttaaaaaaagaaagaaaacattaaagacagaggtaacattagcacaaaaaaatgtgtataatcaaagtctagagggaggcctaaatgtaaatcaagctttctagtaagcaaaaacaaaagagaaaacctggttaactccaaggttcagaattgctgtgatatgcagacaaaccagctgtgaagacactgcacaacagtctatgataaaaagacgggagggacatttcttgtttgtatagcaaaggtctacaatttgcaatgcactgtggtaaaacagaaaccataagctgaatgcttttgtcactgaacttatattttagttagaaaagacataagaaactaattgtggcatttaacttataatttagttagaaaagactaaaaaagctaactgtggcatgaatgagaaagaaattactgctctattagtggttccaatactgtgaggccacaggaaaaaaaaaaaggattctgaaagatacggtttggaaagacttcgtggaggaagtggcatatcaacagggacttgaaggctgcctagatatgcaaagaaaaagttcaacggaaatacaggatgaaagaattgggtggtcaaaggaacaaacccacttgctgatagattgtcaaaaagtatagtgtctgcactactatgtgacgatgacattttttttccctttgtcatctaaaattgctatcaggccgggtgcagtgactcacgcctgtaatccaagcactgtgggaggccaaggcaggaggattgcttgtgtccaggagtttaagacaacctggcaaatatggtgagacctctctacagaaaaaattttaaattatctaagcatagtggtgtacacctatagtcccagctactcaggaggctcagataggaagatctcttgatcccaggaggtggtggctgcagtgagccaagattgtaccactgcactccagcctgggcaacagagagagaccctatctaaaaaagaattaattaattaaaaaaataatattgctgtcagtaaagactgactagtctgtgtgatatttatcatagctatatttcataactccagtgacctttttaaataaaaagtaaggtccagttgaccctccctgtctgtaggttctgcatacattcaaccaaccatgggtcaaaaatattcagaaaaaaaaatttaaaaatacaataaaaactaatgtaggctgggtgggtgcaatagctcacacctataatccttgcaatttgggaggctgtggctagaggatcacttgagctcaggagttttaggtcagcctggcaacatggtgagaacctgtgtctactaaaagtttaaaaaattagctgggtttggtggcatgcatctgtagacccagctactggggaggctgagatgggaggatcacttgatcctaggaggtggaggctatagtgagccatgattgcaccgctgcactccaacctgggtgacagaatgagaccctgtctttaaaaaaataataaaaataaaaatcaatacaatataacaactatttagatagcatttatgttatattaggtattacaagtaatctagagatgatttaaaatataggaaagaatgtatgtagcttataggcaaatactacgccgttttacatcagggacttgagcatttgcagattttggtatccttggggggtcctggaaccaatactttgaggatactaagagatgattgtccattaaaaatgttttaccataaaggaaacattttatctcttctgtgtcagtctgtgaccttttgggtggaatctgaacaatgtgtaaatgatagtttcccaacagtgtgcgctgatgtgtaggagtagaaaatgatcctttggttttcatataaaaactttcttatgaaacatgaagctaacaaccaagaagattaatcccaccagtgagacacaaggaatgcttaattttggaagtgaagctacttcctcatccctgaggcagcacatacactttttcaataatcctttatttaacaagatccaagaatattaatatctaacagcttagcctaaatttcttgaaaggaccaagcccattgtgttgtctcctgacttgattttcccaaactgtcatggattttctatctaaggaagatgagttccttagttctgggaaaacaccattgaggaaggatgcttcagaagaggaagggatgtcagccagggcagataaaattagcaagaaatattaagattaagtgctatctaagaggtacaaaaaataatagtgtttcacctcaatagaatcttattgttaaaaatacagtgtatctacagttctgaagattatcaaaacacaatattctagccccaaaacaggaaaagaataatgattcttaagaaaaaattctttctgggctgggtagggtggctcatgcctgtcatcccagcactttggaaggctgaggtgggtggatcatgaggtcaggagatcgaaatcatcctggctaacccagtaaaaccacgtctctactaaaaatacaaaaaaaaaaaaaaaaaaaattagccagacgtggtggcacatgcctgtaatcccagctactcaggaggctgaggcaggagaatcacttgaacctgggaggcggaggtggcagtgagccaagattgcgccactgcactccagcctgggtgacagagccagactccatctcaaaaaaagaaagaaagaaaaaaagaaagagagagagaaagagagagaaaggaaggaaggaaggagggaaggaaggaaggaaggagaaagaaggaaggaaggagaaagaaggaaggagaaagaaggaaggaaggagaaagaaggaaggaaggaaggaaggaaaaatattctttccatccattacacactgtaatgtaaaatgatgtgtcccagacaatggtctgtaaaccacattttgtaattccattgtaaaagataatgtagtgcgagcaaggccaaaaatccactattctttggaaaagtgtgccatttaattccactgaagataaggcagttggcacaagtcaacttttccccctggcttagatgtagttgtgcctttcaaaatgagctctctcatttgccaaatacaaagaagagaatagtgttttctcagaggaccacaggatatcaaacataattaaaaataaaagtaagattccctttgaatctagaagaaaactcacccaaatttcttgtaccaaatgaaggtatactgcagattttatcacagtcattaccatgagcagtcaataattccctgaatccctgttggacagaattacatcaggtacatgtgttgtgatgttttctgttttgagttctgtttgttttttatttattggtaattcagataatctcagtttcaggaatttgttttcttctctcctaaaatggagctgatgttcatctcttccttatgttatacctgtatttatgcaccaatttcatagaaaaccatcgtgcattttcccatggaattttgggtgacagtttaagatcagcgtttactataatgggcagacttaaaatggtccccgtgatccctgactcctgaagttcactcccttgtatgcttccccctctttgaatgtcagcggacctttaacctagagaatacagcagagttggccagatatatgtgattccatggttatcttatgtaagattggagtgcatgtcttgctagagtcttttacttccttattgactttgaggcaccaaggggccatattggggaaccccacatggcagcctccaactgagccaccaaagaagtgaattctgccaacaatctgaaggagcctgaaagcacagccttccctggttgagcctcaaatgagactgcagccctagccagtactttgattacagctttatgagatcctaagtaaagaaacaagcataactgagtcaggattcctaagccacataacccgtgagataataaatgtgtgttttaagtggctgtatttgttatacagaaataaaaaatgaacatacttactaaaaaagtttttagctgttgtgagtcctggtaattggatttgttttccagtgatatccatggacactgtgtcaatagtgatgattgatgctgatttgttttactcttatttattcaggatctgggtattaaaaataaattcaaactttcaacaggctgatcacctctgcccctctccctattagcatgtgcatgtgtgtgtgtgtccatgtgtccatacatgagtgaatggatgtgtatttaagcttaatcatgacacagggggttgtttatacagggtttttagaaaacaaaaacattgtctctatgaggcagttccttagaagccaactctcaacagtgtctcagtgtttccctcctgtaatttttccacacattatgcactggattttagtttgtgatactcaggattagtcatgaaaccaagtctttttgtgttctatggtttgaccagccctgtgcaagtctccagggaagcacgaaggacgggtaaatcagagtcccatcccttgaagcatggtggtattagaacatcacttaaagaacagggatacattacccatttagtgaaataatctagaagtcctggaaactaacttagctcacaagatgatattcattagccaatttacttcagaaactttaagaaaatcactttacctcctctgtacattcctccttccctccttccctctcttttcctctctccctccctccttccctcccttctttccttccttccccatattgttattaaatatgctcattattagaatagtatcaaagacactgaggcatttttagatatcttgtgaaatactccttatttttgtctcttcctttagatatcttaattatcaaaataatctaataagactctatttggaaataaagtgaaggagggtaaagttgtgtttttaaataggctgatcagtgctagaaataataggatagttttaaattctagcaattatagatcaaggctccatatactatttctaaaaagtctgtgaacccctgggaattgtgaatgtttcccattacatcctgccaacgattcttattaacctattggtgacgtctttcccagaggtgaagctttgatctgcttgtcatctcacattctgtctcaccacagtctagagcttccaggtccatggggaacaaggatggggcagcagcttccctgtgccaggactgactgggaaattccagaattctatgaccaggtacctgggaagggagaagagctctctgagttacagttagtctgggagcttttgaagtgaaactgtcatagggaaagtgaaggaatttgctttgtgcaatcatcatgccatagtctgacaagacaatggaaaaagaaagaaggaattttctctcaagatgtcaaataattagctgagtcatgaatgcaagcaggtaggcagaaaacagatatttgtagagaacttatttctctttctcctaatgaagtttttgaacaacaacgataaaatggaccttttgcctaagaagcaatttaacaaccattgcttcagtaacacgagaaccaatgtgattagagtgcttgtgctctgtcccctcataaatggttagtattgaggccttataaagaaatataacatctgctttttatacataaatacctacacgtaaccatccacaaataacttacgaatacccataataaacacagaatccatcattatgttaaatgccactgtgattctgagcattttaatatgctgtgaaggcatcagagtaaaacagaaacaagttatatctaaataggaatgcccagtacatttaaagtaatgagacgttttgctaaattcatatgttagcaatatgtcatgtggagtcatgaaggatcagaaataaaaaacagtaattgtccaagccgtcaaggagggatcagaagcaggctttgatcccaggctctgagtagagttgctgtggaattgtagattacatagaatacaggtggcatcaccacagattcctgtttatgtatttaacttgtaacttctcattctgacatcacaggaatatttttccttaacaaagtgaaataaaaagtaaataagctctttaatattgggacataaccaaatcagagggcaacacaaatttacatgggtacttgtgaggcaaaagaaagaaaattcaaaattcacttctaaaaatggacattgtttaaagcacatttaataagtgttacagagtgatgtttcactgtcacctttaaataccccttactgtttctttgggattaccaatttcaacatgaaggtccgagtgaactttgctagaggtgatttgcacaggctcatatgcatctcttcctcatattcagtgacctcacattagcagctttaaattggccatgttgagaacattgacaccacagaaattggcaaaaactagaaatcaagtaacacatgctacaagtctttttttttcttttctcccttcttggaaaattgtaatccagttgttaaatatttatcattataaagtagatccttgttaaaaatattctaatcctcaccaatggttttattttctttctgcctctcttctgctgcccctaaattaaagtaggtctttttatttggggctaagactagttccatcaaaatataaaatagatgaaaagtgttttggggcctttttgccctcttttcctagaccttttctgtttctcctcttgtcaaaatctcacttttttcctttaccttttcagccctgcttcagccctaggtcttcctaaaccagagaattttccaaaaactgcgtgaatatatatgccacaggctgaaatagtcttcccaaaaattagtcattaaaaaagtagagaaagaagatataagttttacatgaaaccctatatagataggagttccttcgagtattttcaaacttgattaacaacagagtaaattatttaagaatgatttaagaaatcaaagtatgagaacttggggctgatccaaagatgtggggattcagagatgaggggcaggcatagaagaggagaagagactgagtatttgtcaccacgtaaattcctgggcgagttgggtaaattttttattataagaaaacactcctttttcttctatataaaatttttttcaagtgagttgctaagttcattgtgagtcatgcattcctttgttcaagtgtggacaaatggtccttattttgttggaattttacactggcagagatcaatggtacaacctggtgaaccccccacaccaaagacacacaggtgtacttaaaggctgatcttctacagtacgcatctatggactggctttggggtgtgttcccaaacactcagagccaccttgagctggggaactggttagtacaagtctctttatgtgtcccttactctacaatcatgcacctagggtcgtgcaaacatcctgaaaccaacccaagctctaggagtcagaaaaggccctgaatgcatcttcaatacaggatctgtgcacacagcatggcctgcttctagaaaaccaatggggctcagaggcagtccagacagaggccttattttaagggctgatagaataggctgtgtttccccaacagcctaccttggtgagtaaacaccaacaattaattcatttatttactcactcaggttagaacattgtgttttcaagtttctaatattaaatttctttttcttttttctggaatagggactatcttattcagctcaaaataccatagactgaggcttaaacaaagacatttgtttcccaccattctggaggctggaagtccaaggtcagggtgccagcctgcatggcgagggttctggtgagaactttcttcttggcttgcagatggcagccttctccctgttcccttacttggcagagagacagagtgagccctggcatcttcctcttcttataaggatgctatattccatcatgggggcccaaccctcatgtgcttatttaaacctaattacttcccaaagaccccacctccaaatatcaacacattgggagttagggcttcaacccatgaattggtagaagggcgggaggtggacacaaacgttccatccataattctagctggtaacatcattgttagaatcagttgccttgccagtctcagaaaacaggacactgagatgcaaagacatgtacatttccatttgaggcaggtgccaggagacaactgagaggacactgagtttagaacattggatcaggcattgagagggaatctgggttgctggatgcaagaggctagtaaggggtgatgagagttcttcacataaatcaacctataactcacccagcctctgtgtcccaggggcctatccattattgatcaaaatgtcagtagaccttttgggttgtgtttcaaagagtaaccattatcttagagattcatagcaaaatatgagtggttcccagtaaaataaatcagagtttcctttatcttagctagaaacacctattgggacttttgtcaaattatttaggggaagaagaaggttgaaagcaaacttccaattgaaaagaagcatatttattgaagttcagagggctggagcgttgttttttgattgacaaaataatgaactctctgataagagtccagaattagttggctgaatttgtattcatttctccataaatttgccaaagttagaagagaaaatccatagaggccaaatgaagaaccatttgattaagcgtgttatcagcctggttgtggccaaattccacctcatatattcatgcacacattctttgctatgagttgcatatgtgctttgtggttgtgggcagatttaggtttgtttttctttctgagtcttttctggtccaaaagctcatcatttaaagttttggaagcaatttagaaagctattagattcccaaccccctcccgacttttggaacacttgcagttatttttttctggcacaaaaacaatcaaaaaggaaaaaaatgtcaggatatcttccaaagagagacataaaggtaacattttatttataccatgatttgtttattcttatttgttgttaccataaaagttatttaatttttttgaactgaaaggcagatgattttaggggataaaaaacctaaaataagaagtgttgctatgtgattacagagaatagttgcttttgttctgcctgtgtttaattaaagcaccatttgagaaattcaagaatcaggtggtaccgttgagtcactggacacatttttaagcaccatcttgaaatgtgatataaattgattttaaattttaaatttgtaatcatacacttcctctaaattgggaatcatgagagcatttctttttaagtagtttgtgataattttggaatttgaaagaaactttaaaggtaatgtatttaaagttactcacagaaatatgctggatgtgttgactggtaactttaaacatgtttatattgctatttttctagcacttgaaaagtaatcatgttttatagccaaagtcatctcctgtccatagaacaattaatagtcataattgatagttttatgcatgaaaattaagtattgctcctgcaaaactgaggagttaatgtctttacgtgctttttcacaaacattccttataatggaacaccaaatgcctacaatttgaacacatggctggtggaaaaaaagaagaaaaagaaaatcaatcctaagccagaaatctgaaaaaagacagtgactttgggtcattttgtaatcatctttggtgcttcagtgactaaaaaatacatgcagagtgcaagagcaccttgctgaatcctacaccctgccctccttgtgcagttatgttacatgcaactccaaagcctccacagctgttgtctctactctccattcaaaacaatgcacgtgcaactttcccttgtggctggcttcgtcctccacacaccaatgctttgtgtgaaaaggtttcattaaaattgagtttagggtaagtacgggataggtggagaaaagattttcttctaatgcttctccagaccacactgtttagccttcaggagacccaggaattgatatgagcaaaatgtttttacacatgaactgttctttaatcccttttttgcttcttcaatccttgaacttcattccctttcttttcattaacatttacaacacacactttacagggaaagaaagtgaaagatatgtaatgattctgcctgctacatctgactgtactccatttctcacattctatcctcatctttttctagccacctgagtcttcagacagttttaccatcttccctattttaaccccaatttaaacatccacaggaagccaaacaaaatatgcccatctgctccagatgtgtcaaatcaagttctgctattttaatttttttccaggcaaaccctccaacaaatgtataaacaggttgctttttagaagaagtaaagattaatgtctctctgggaaaaaaaaatcccatgcattttggaaagtctggctgttttccccttcaaaaaacttcatgtaaactaaatgcatggcttgatcctcccatgtaccagaaggggagcagcatctttgagctctcttcccaaatcctctgcttggtctgggcgtatcctgtgaatgaggagagaatctaccccacagccagatgcttgcatttggccacagttcatttccaggcagcctggaagagagcatcccacaacattgaacagaggcagccaagatactgtcgggtgatcaggacagctcccgcctctgtgttcctgtggagcctccttcctctccaaggaatttgtcgcatgggactgcataattcagttgtccattcagtcaacagtgatttactaacaacctactttgtgttaggcactgttccagggtctgcgcattcagcagtgagcaaaataacacaaaatgcttgctctcatgaacctggagacagacggtaagaatatacagcgataggcaacatggtaggtggggatgagtgctctgaattaaaataaggcaggacacagagatggagagtgacctggacaggacagggttggcagctcagaagtgcattatctacagtggtcagggaagcctctccagtgaaaggacattaagacggagctgaaggaagggagagagtggatgaaagagcaaaatccctggaactgggacatgcttggcaggttgagtgtccacaagagccccaattaactacaggagggtgagcaaggagagagtagagggagttgaggttagagaagtaaccgtacgtcaaattatggaggactgagtttctcaaactccagtgtctgcgcaaatcccccagggatcttgtgaaaccacaggccttgatttagaagatctgcggcaggcccagggtctgcattcctaccatgcccccagatgatgcccctgcctctaccgttccccagaccatgctttgagtagcagagatgaaggccttcttgcccacagtacaaattctgctatttctttcctgttaatttgaattggtatgcaacaactgtacatatttatgggataagagtgatatttcagtgcatgtatacagtgtgtaatgatcaaatcagggtagttagcatatccttcactgtgaacatttatcatttcttcatgttgtgaacattcaaaatcctctcttctagccttctgaaaagataccccagagtattgttaaccatattcaccctacagtgccacagagcactagaattcattcaccctatctagctgtaactttgtatctattaaccaaactcttttcatctttcactctcccatacccctccctgcctctaatgactacaggtctatctctgtttctctgagttcaatttattttagcttctacatatgagtaagaacatgtggtatttgtctttctctggctggcttattttagttaacatgatgttcttcaagctgatccatgtttgctgcaaatggcagaatttcattcttttttacagctgaatagtattccattgtggatatgtaccacattttcttcatccatccatctattgatggacacttagattaaaggtactctgcttttactatgagtgaagtggaaattttttgaggcttttctttttatgagacaggatctcattctgtcccccaggctggagtgcaatgtcacaatcataattcactgcagcctccactcccagggcacaaatgaccttctgcctgagcctactgagtagctaggactacaggtatgcaccaccacaccctgccaatgttatattttttgtagaggaaggttctccctgtgttgatgaggctgctttggatgcttttaaatagtggggaaataggatcagactcatttttagggagcccctctggctgctctgtgaaaatagggcaagggaggaaataggagacctcctgggagataactggagtagtctgggtgagatacttcagtgccagcatctaaggtacttgcaggtgggacagccacaacgaatgccacttcaagtgaatgtgaggatcagctctgctgcccacgtggaaacataagtaaggttgttacctgtggccttgcagaagcctgcaagtcaaaggccttttgatggttggtgaaaatcacatctgatatgcgtgattccaggaagctcatctgcctcattcctgaatttaatttctatccatgatgcacatattactattgcattaaacgtgaagtcattgcctcctgccattgtaatgtatgcatgctattgcagaggaaatgtttttatctacctcccaaataagtaagcataacttgagctcgcattacaaaatgacacaataaactaaaaaggaattcatttaatatttttaaacatgattttggtgtccttatatttagggaaatattttattgtaagttcatcttacaataaaatttataagggaaagatattttattgtaagttcatctcaggacaagaaacttcacttggcatagaaattaacatccaatctgcagcctgtcattgtagtgagatagtcttgaattccctagctaagttatttacctaaacaaagtcttgttcactttgaatttcctagctaagttttttacctaaacaatcattatatatgtttcaaaatatttaaatttttcccttccctctgattttataattttcttgataaaccttcctaaatatctttaaatttcactgatctaatggttcttaaccaggggtgattttgccccccatcaagggatatttaacaatatctggtgacatttttaactatcgggagttgggggatgctactggtatgcagttggcagaggccggggatggttaagcattctgcatacctgggagggccttccataacagaggatcgttcattccaaaatgtcagtagtgccacatttgagaaaccctggccttctggtgaccacaaggccttcagctacagaaaataaaattcaccaaagatccccacagccatgctttgaaatccttcacagtttgcactgagccatgcttcccacaggctgctccaatgaaggggattactctgaaggccagctttggctcctggattctccaacatccgtgccaaacctttcttatgcagcacagtagcctcagacatttccagctcactcccacttttctctcaggacatttttcctataaaattcttgcacatttaatctcatttagaatctgtttctcagagatcctggattaatatatcatggcattaaatcattgaaaataatgaattaatgatctttcctcattgtagtgatatgggaagaaaacgttctgatacacagaacacagaaatggctcagaaatgagaaactgactgactactaaattgttagtaaaagcaacagaataagtaagtgaaaaatagagcaatttggggggaaaaaaagttgagaaaccccaatcttcaaaaaaaggataaaagtcttagcttttgttcatgtgttatttaaaacccaactcaggcctcaactgaaacaactaaaattaggaaccaaaattgcatcccctgcccattcacacttttggaaccagagtggttctggacatagtcatgaggtcatcattcctaattagagtaggaatttcaattcttgggtttctaacccaaatctcgctatcctcagaaagcttgacagtatttgcagctctgcccattagatgagatctaccctttgcctttggtcaggaagagtcctatgtatggacacatcaccacagaccactcagattccctcttaccttccctaggacactctgcctcccttcctcctttccatgatactcatcactctgggtagactctgcccaggcaacaattgccctctgtggtttgccaagacccatcctgctttctgggaatagatgagtccctctaaagatgggcatgtccccagccacccaccactgtgcaggtggcagctgacgtctattgtcctgcaactcacatatcctgatctctgctctgttatgaactccagccagagaaatatacagatcttattcctgattcataagagactgtgtttgccttggatttaaccaggtctgatgactttcaggatttattatgttgatgaataaagggaaattctctcccttaaactaacacaatgatctctctgaatcagattctccctatacgcagccagcaatactagagaagccccagagacgctgctacttgagggctggcctaccgcagagctggcgtttatgttgtgatgataaacattcttgaaaaaaccctgaaggagatcctggcattttcctagtgcctttatgtgccataccgagtgcaagctgcttttcatgtactaactaatttaattcctgcaagagtcctgtggcatgggtatttcttattcccattttactgacaaggacactgaggctcaaaaagttgtttttttgttttgttttgtttttgagacggagtctcactctgtcgccaggctggagtgcagtggtgtgatctcagctcactgcaacctcagactctctggttcaagcaattctcctgcctcagcctcccaagtagctgggattacaggcacgtgccaccacatccagctgatttttatatttttagtagagatggggtttcactatgttggccagaatggtctcgatctcctgatctcatgatccacccaccttggcctccgaaagtgctgggattacaggcgtgagccaccacgcccggccaaggctcagaaagtttaagtgacttgcccaatatcacaatgttagtaagtggtagaggtataatttggattttatttgaattggaaaaggctgtgatctttctaggtgatattctaggtaacactagtttccagcaggcactctccattacctgcgtctgttaggtctgagtctgctatggttttctgactgatgtgtagggtaacacaattaaggaactctccactggaaggccaagtctccactcaggcacgtaggtagctggcagtcctccttgattctgctagccagagccagcttattgaaaacaaaagcagtctgttaggacagtgcccagacttctgacttcactacggaggctaggaaccaagtcaatatcatcagtcattactttccatcaacctctatcatttacatgcagtaggtgctcagtaaatgctgataaattcctgtatgaataataaatgaatgaacaaacaagagcatttgtctgtacaagttacagagttttagaatagaatgtaagtgtgaagctcgataaattcaaacttctgcaatatccccaccaagtggttatctaaattccgtttgacttcccttggcagggaatacgcacgcacactttctaaaggagtttttccacttcatatgactctggctgttcagaaggaatcactaattaaatgagatctttgaaaaaagtcaagaaactggaaataagtaggaattgctttacctgatgcttatcagcttacaggctttactgctccaaaaatttggttcgatttgaaaacattatgctaagtgaaataagccacacacaaaagggcaattattgtatgattccttttatatgaggtacctagaataggcaaattcatagagagagaaactagaatggagattcccaggggccgtagagggagagtagttattgctgaatgtgtttggggtttcagtatgtggtgaaaaattctggatacagatgctcacatgtcattgtgggtgtctttcatgcaactgaattaggttttttttttgtttttttttttttttttttttttcagataaaccatgaatcacattttatttattttgtcctttcatttttttttttttttttttttttgagacagagtcttgctctgttgccaggctggagtgcatggtatgatctcggctcactgcaacctccacctcctgggttcatgctattctcctgcctcagcctcccgagtagctgggattacaggtgcccaccatgatgctcagctaattttttgtatttttagtagagacggggtttcaccgtgttagccaggttggtctcgatctcctgacctcgtgatccacccacctcggcctcccaaagtgctgggattacaggcatgagcctcaacttttattttacgttcagatggcacatgtgcaggtttgttacatgggtaaattgcatgttactggggtttggtgtacaaattattttgttacccaggtggtgagcatagcatagtacccaataggtagtttttcctttttttttttgagacagaatctcgctctgtcgctcaggctggggtgcagtggtgcgatctcagctcactgcaacctccgctcctgagttcaagcgattccccctgcctcagcctcctgagtagttgggatgacaggcacctgccaccaggcccccataatttttgtatttttagtagagatggggtttcaccatgttggccaggctggtctcgaactcctgacctcaggtgatctgcctgcctcagcctcccaaagtacttggattacagccacgagccatggcacccggctggtagtttttcttcctcatcctcctcccaacctccaacctcaagtagcctccccccaacagtgtctattgttcccttctttgtccccatgtgtacttagtgtttagctcccacttattaagtgagaacatgcagtatttggttctctgttcttgcattaattcgtttagacatggcccctccagctgcatctatgttgagcaattaaaaaaggttaagatgagctaagtgaggtggtatgcatctgtagtaccagctactcaggacactgaggcaggaggatcacttgagcccaggagttcaaagccagcctgggcaacatagtgagaccccccccatctcttttaaaaaatatttcagatgataaattttatgctgtatgtattttaccataatacaaaattggttgaagaggagtacatataaacacaacaacgaagtgtttaactcatcaatttcagatacacagtaaaagaatgtatatgagaattggtcaaggacattctgaggctttaagcttcaagtcaagaaaaacaactgcctttctgaaaacttacaccgctcacagagtctggtgggctatgaatttgatggtacaacttctaacttgacagtgtggagatcaagggtataggaatgtaaaaagctttgaaaagtttgagagtggagtttgcacagctggacacagggcaccacaaacacaggtggtgcatttgtgcctttggtggacaaagtatcacccacaatgcacaggcgcttccctggctggacaataggtctctctctccatcccctctctctctgtttcaagagaagacattttacgtaggaccttccactctgaatatgaagggtatatcatttccctctcaaatccagactcctctagttgaatggctgacagccaacagaaggggtgtatgcacccttcattaggccagatttactgtccgccttccatgagtggttcagcatgctctctgtccagctgtggctcctgcctgcaaagcgtgccatcagcttcctggttcagagagagctaattttctctaattgcttccaatgagaggtgggaggcaggagggtatgtgccccattcagagccgctgttctcatcagcctcaccaagcagtgagagcagctttcacattcaaggtcttctttccattatttgggtaaaaatgttttgtctcataacctgggatttaagaatcttcaacaggttgcttaacccttaaagatctgacccacctggcctttaatagatttaaagactttatttggttttatgatttttaaaggaatcataattcctacttatttaagaactttaattcctatataagaataatttattctcattcatacttgtaaaaaaagtgtatccattgttttagaaaaggggaaaatagaagacaggttaaaaaagaaaactaaaaggcatttggtgttgcttagatgtacatgttttgtagtatatatatgtggttttgatcataaataatgtatcaaagacatataataccaatttctgttcttttttctgaaatcttagaattgagtccttagaagaaataccaagctaaagggcatgtgaatttctaagtttcctggcacttaattccaaattgttattccaatttctagtgtgccatactacatctttattagcattcaggattatcttcttggttaatatagtaaaatatcattttgttgtttgaattttcattgctttgataattgatgatatttaaagatgtttaggctctttttttctttttcatttgctcagcttttctgaaaacctttaggagacaagtttctcccaaattttttctactgagatttatgcattactgatatgacttctaacatataagctagttaacatcaagaggattagtctatcacaccacttgtcacctggggcaaggtagtatccagttcattagggtaaaggtcaagtaagtgttttgtttgtttaaaggggaacacgggtaggagttatcccaaagttagaacgcaatgaaacccaactatatagtaaaatatatttggggctcaactctgttagccatcaaaggtagtacaaaacatcagaagatgaagagggttttgaaagaaagaagggccatgtcagattaagaggtagaggaacatcaagataatttttcttctattagagtttctcttttagggtttctattagagtttctctaatagggggtagagaaacagcaagataattttttttctattagaatttctccattagagtttctcacctgcaaggtgttgactttccagttacctggcatttcattctactttttggaatggcctgagctgaaattaatcaggctctgttgatgatgcatccaccagggtttcccattggatgcttagaaaaaattccatcacagaatatctgtgtcttgtcttcttgggggctaggagatcccccaaatttttctcttctgttcttgtttgataaaggatgtgtggaggacctggtgcttaagagtttcagtttgacataaaggtactagttctggagagtctcttgggccactttatgttaacaaagactctcttgatcagcctttagttaagcttctctgagctctctccttgactaggcttcaaccttgggcttctgtgtcagtccttgtggagtctggttttagcaagaatcttgcaaagtcagtttagagagaataccccaccttttatatctgatcaatttcctcaatccccacctgtaatgtataagcccttgacctgccttgagtagaaatctcctacccttcatgtctcctcctagtaattttccatccactgaccccacactctgctctttgactctaaatcttcatttgtccttgttgtcttcaatgtcgaggccaatctctttcccctaccataatatctctattgaaatagtcctgaacaaagtcttccttgccattttcacacgtgccagaataatgcttgcctccctgcctgcctgccttccttccttccttccttccttccttccttccttccttccttccttccttctttctttccacagaatctcgctctgtcacccaggctagagtgcagcggtataatcaaggctcacagcagcctcggccttccaggctcaagtgatcctcccagctcagcctcccgagtagctgggaccacaggcacatatcagcacgcttggctaattcttttttgccttttgtttgtttgtttgtttgtagagacaaagtttcactatattgcccaggctggtctcaaactgctgggctcaagcaatcctcttgcttcaaggtcccaaagtactgggattacaggcatgagccactgcacccagcctcacaattttttctttaacaatgcccagagcatatgctgagcttcccgtcactctctggggcggaatggaatattacacaactggcacggtaaagaatgcacttggttttggtggtggataacattttcctttgcacctgaagcacttccacaaatagcccatttgtcctccttgcaattaaattagaaaaactgtctctaagcttggtttgacctatctgtagctctttgaaaagactgcttgatctttcctcactctccgtgtacctaaatcttgttcaggctctgtccagaaatcaataggaaacataaaaccttgaagcattataaaatcaggcattctaaactggaaagggcctttgattatttagcccaaatgcatcacctgttttacagacgagcaacctgaagttcggagaggtggaacttcctccaggtcatctgctgcactggtgatagaggcaggactaaacactctcggtgcagtgttccttctctgagtcatgttgactactatatgctcattcacagtcacaaactaaaaatctcagacaagtcaaaagcatacaattacaggaccagaagactcctcagtgattatctgggagtccaggcatccaagggacttgaccaagtttttgcagctattgctggtagaccaagtacggaaatacacttctcttgactctcagtctagtgctcctttccctgcagtactctgtgcaataccaaaagatatggatctccaggattggctgaggttagcaattaatatggtatttttagtcatgtctacttggagtagggggtgctgatttttgtttcatgtgtgttcttgagactttttgatgaggttccgtatgcctcactctaggtgatgtttttattagtaccatgttgtcttcctataaagagtttttatggcgaacagaaagctgtctggattcttgctatggttgtaggcaggagggaacatggtgtgtggcttctgaacaaactctggctgctctttaagttcaatgaagtgaaaaaaaggcaagttaattgactacagacatatgcaagagagctctcaattgagccataagatcttttgggatgtgggtgtttacaaggtagctataagcactctcataagtactgcacctgtgaatcatggactttcattgtacatagctttccactgcttgcttcttgaggctactgttcagcccatcagtaatttttaaagatcctttagaaagttatatagaggaatgcaaatgtgagtaaacaaggcgcctctacctactgatggcatcttcaatatttacattggcccgttgagttttatcagctggatattgctataaaacacatcacctgaaaattaagtggtttgaaataatgagtatttgtagttgttcacaaacctgtgggtcagctgggcggtgctgcagatctgaaccaggtgtggctgatcttgaatgggctctttcctgctgcggaaggcagccagcaaggtaggtgggggctgatggtcagggatggcctcactcctatgttttcccattggctgactatcagccagggctgcagtgatgactggtgaaatagtttggatatttgtccactctaaatctcatgatgaaacttgatccctacagttataggtggggcttaataggaggtgtgtgggtcatgggggcagatctatgatagatggcttggtgccattctggcaggatccagtgagttctcactcttagttcttgagagatctggctgtaaaaaagaacctggcaccttcctctcctctctttcttcctttctgtctggccatatgatgcctgctaccctttaccttccaccatgagtagaagtttcctggccgggcacggtggctcacgcctgtaatcctaacacttagaggccgaggcaggtggatcacctgaggtcacgagttcaagaccagcttggccaacctggtgaaaccctgtctgtactaaaaatacaaaaattagttgggcatggtggcgggcacctgtaatcccagctactcaggaggctgaggcaggagaattacttgaacccgggaggcagaggttgcagtgagccgagattgtgccattgcactccagcctgagcaacagagcgagactccatctgaaaacaaaacaaaacaaaacaaaaaaaacctccatgcttcttgtatagcctgtagaactatgagccaaataaacttattttctttataaattgccctgccacaggtatttcttcataacaacgcaaatgaactaagacaacaagtctctgtgttctccttcatctatcatactacccgaggtttgtttacgtggtaaagacaaggttcggagagaaatggttgaaaccagcatagcttcttgagacacaatgacacttatgccacatgctattggccagagcaagtcacagaacatctggattcaagaggagggaaatggattccacaccttgatggaggagatgcaaagtcatatcacttgggacatggatacagggaggggtgcaatttgggatgtttttgcaattaacctaccacaggcttaaggaggcttttaggatttaccttctgctctaatgagtttcaaccaccatggcttagagaacatttcttaaaactcagtcatctttcatgtatccattgttctccaaagggactaagttttgttccatggtcagtcttttccatgtgttcttggaccttatacaaaacccaagcctggaattacagcacctggatttattcatcaagcattcgccagttcctggttctatgcatgtgttcacaaaactcagaacagggcattcctctgaatagagaagaaaaatagagtcagtcagaaaagaaattttttgtctaagaatacaatccaccgtactaccaccagacttggttccctttcaatgtcgagagtaacacattccttttatgtgttgcttaatttgcttgttttaagcagttccttgtttttggagtgtcttttttgataacattgagataccacatccactgatcatgtctaaaagctgacaatttctgaaggaaataaactgttcaaaattaactactctctcactatatatatagcattgtattttcagtacacatttttggtacacatattcgtggtacatattttccagctggcttgtgctaatgtactagtgattagaaccaagactaagaaaaaagtgcattgccattttcaatcaacgtgggtagagctgaatggttgattccaaatcaagttattttgcctaaagcaagacagataggagagagagagagagagagataatacagagatagataatcacaaactgccatttagagaaaatcattactactatcaattataagagtgattagcaagtttatggatagcatgatggctagcaatctttatacaaatgtggctgattttcactaagtcttttaattctcagaattgtttcatgacttttttggagaaaattgttgaggcatgaaaagaatttcatgactgagatagatattgtaccttaggaaatataaaatttaacaaatctgtagaaaaggaagacttaggctttgactttaaaagcccattccacttacaagatttcattttttgtttattcaatttggaaagcacattttcttatataatcaataagaagatttttatggcatgctcgagtgtagtctgattccaggtctcataattcctttgcactcaaaaaaggaactttgttacatcttgccactcatgctcactcttcagtgggcaaagtgactttgccatactgtcaccatccttgagccactgcccggtccttgaaaactaggattcttcatttccttttgcatcgtcagcgtgaggaaggggagggggaggtaagattctggacagctggactgaaaacaatggaaaatccctagtaacagcttgaatcactcactagcaggaggaaaatgtgactcgtttcttttcctctttagcttttgttgatttttttcataatgagctcagaaagagggaaagatcaatattcatgttgagttggtatccatcatagtgatattcagtgattataactctccaattctcactaggacaaatataaccacgcaaactggctaactgcacttgctggcatggttcctttggaaactcctggatttctctgaattacaaacagaaggagagttatagattttgtctctttaattttctgtctcttgaaatctcagatcacaaaaattgagtctttcttaactggtgatttcttattcgtcaatgactccttaaaagatatgcagaaagtaatggccctctaacccttcacctttgtaagctctttaatcctgaggggatggacttcctgatttctgttctctcagattctaaggaggaaaagactagctgttgtctctcaagtctacctattgctgtcctacagagcaaggacccctcttgttctccagctcctcaggaataggattcttggttccctaactctaaaataggagctcacaaggttattgtcaaggacaaatgagggcagtgttaacgtattaaaaaaaaaaaactagtcagagattgcttgattttcaaacttgatagtatgctttcgaagttacataatcaaaattatagttgtatttaaaatgttaagttcagcttacaaaccttcttaacctatttgtaagtcaagcaaattttaaaaatccttcttaagggaagcttgattaatgatttcttctcattttcaaatgtagttaaacatttttaaacacttaaagcttgatttgtaaatttaatacatttaattttaagtactttagcttgtctaacttaacaaatgagatactcatgaatatttgaatagctcatcaattagatacttataaatatgaaatatagtttttaagttcttttaaagttctcaatgtacttgtaaacttgtaaggatttcaggtcaaaacgataagtttaaatcatttactcgatttaacattttaaattggaagcacaattctaattcactattattttaataggccaaaatatcttaaaattacaagtatataaaatatcagggccaggcacagtggctcatgcctgtaatctcagtgcttttggaggtgaagccaggagaatcactcaaagccaggagtttgagcccagcctgagcaacacaggaggaccctgtctctacaaaaaatacagaaattagccagaggtggtggcatgcacctgtagtcctagctatttgggaggctaaggcagaaggataccttgagcccaggagtttggggctgcagtgagctgtgatcacaccactgctctccagcttgggtgatacatcaaaactctgtgtctataaagataataaaataaaaatatgactaatgcaaaattatttgatactatgggtttcatttcatacagtcatatgaaatgaaataattatgtatacaattatatatatatacatatatatagagagagggtgtaaatatataatttattcttaatgctcaatcttatcagagctgaaagatggttacccatgaaggaatcaatgacaccatttcacatatgattgcagttaccattcccttgtagttgctgggctagctctctcagctttccgagatttttttgaggctcagaggacctcctctcctgaatgagaactgggttctaacgaatgaccctaactgtgccctgttacagtggctctgtcttatgcccacgtgaagtgatgtcacagaccatattcacgatatcgaagctacacattactaaaccttctgccgacccacagaagcccaaaactcccatcctcatagtcatatcaatggattagattttattatatttgctgcaaactctttttataatgttcttcctactcaccttattcttatgtctattctattgagatctaattaaattatgaatgtctcttaagactctatctggctttatagtgacaacatcaaaggatatttgtattagttagggttctgcagagacacaggatgtgtgtgtgtgtgtgtgtgcatgcatttgtgtgtgtgtacacaagtcccaagatgtacaggttatgttggcaagccaggagaaccaatggtgtagttcccgtatgaaagccagcaggctccatacccaggaagagctgacatttcagttccagtccaaagtcaggaaaaagccaatgtcccagtttgaatacaatcaggaaggagaagttctttcttattcaggggaaggtcgccattttgttctcttcgtgtcttcaactgactagatgagatccagttacatgaggtagggcaatctgttttagtcaatttatatttaaatgttaatctaatctaaagccaccctcacagaaacaccagaataatgcttgaccaaatgttgggtctcctcataacatacaaagttagccatcacgatattttcctggcatacactgtgaaaccactgacctggaaccctctgacttctgtcagctatttaatagataagtctttctaatcttgagtgtttgtaaagcagttggatataaatttgaaaatttttaaatgaaacgataaatcatgtgtgacctcttgagcctattaatcctaaagtaaaaagtccttgtacaaatttttatccactttttttttttttttttttttttgagacagagtctcgctgtgttgcccatgctggagtgcagtggcaagatctcggctcactgcaacctccacctcctgggttcaagtgattcccctgcctcagccttcctctcaagtagctaggactacaggtgcacaccaccactcccggctaatttgttcgtatttttagtagaaatggggtttcaccatgttggccaggctggtcttgagctcctgacctcaagtgatctgctggcctctgcctcccatagtgctgagattattgctatccactcttgatactgtttggcatgtgacttaaaacaagcaacagttgaaaatataaactagaaaatgagcatatatgttcattgttgctaaaggcttggtaccagcaccagctacaggagtttatagcataccttctcagagaaaggcctcttcattctgggtttagaggtgttggtatcctctgttgcaagatgttattcaatcaattcaatcctgagttttcaacatcagcaacattacatgtgcatttacaggaagaagaccagagtaggaacactttcattttttcccccaaccatctacaaaaatgaagattacctgaaatgtttactttatactatgatcttaaaactatttattttaataatatctatataacccagatcaagaaaaccagtgaaaattagcctattcaatcctttcaaaaggcttttttattccaaaagattgaataaaattagttactccctttatcctgaatttcactacaaatattacatttgcaaatgtcccatctgactgtaataaatgccagtgactttaactctgtggttggtgatatgaagaaaaccatatgtgatagattctaaatatataaccacaaaagccaaactgacggtttggaacatctcagcaactattattgattactacagttgaagaggttgaatcagtttgcatggcaattctcctcctcttcttcctcccatacccactcctcctctttcttatttttctctcttgctctctctctctgttctccattcgttgtttctttctaattcgcagtagcagtagcagcaaccagaaaaatatttgagaactttaaactaaatggttaactaataaggcaataaatagaaggtgtgacactgaacgaggagtaaaagccaatgcattccactacattgagagacatttatgaagtatattgagttacacagacactaacattcagaaacaataaaatagagacagtgtaaaaggctaaaaatgggctgggctcggtggctcacgcctgtaatcccagcaccttgggaggccaaggcaggctgatcacgaggtcaggaatttgagaccagcctgaccaatatggtgaaaccccgtctctactaaaaatacaaaaattagccaggtgtggtggcacacgcctttaatcccagctactcaggaggctgaggcaggagaatcgcttgaacctgggaggcagagtttgcagtgagccaagatcatgccactgcactccagcctgggcaacagagtgagactacgtctaaaatataaaataaaataaaataaaataaagactaaaaatggcccccaaaagatatcaggttaaatccctggaacctgtgattgttccgttatatgataaaatatatgatttagttaaggatccccagaggaggagcttaatctaaattatgaatgtagtaaatgcaatcacatgggttcttctaagagagacagggggtgttttgagatagacacacagggaaggcaatgcaaaaatggagcagaaggggttatagctaaaaggaatgccaagggccaccagagctgtgagaggcaaggaacagatttttccctggagcctccggaggaagcaggccatgctgacacattgattttgtccttctggcccccagatctaagaatatatttctgttgtgttaagccagcaggtttgtagccatttagcagccacagaatactaatatggacaatgatttctgagaaaataaaaagattattttgagaaaataacaacattccttgtttgatttttaggaaaagccattttattttaatttttttctatttttttatttttattttttacattgaggttctctttattttttactatttcttttttcttttcttcttctttttttttttttttttttgagatggagtttcactctgtcgcccaggctggagagcaatggtgctatctcagctcactgcaacatctgcttcccgggttcaagcaatttcccacctcagcctcccaagcagctgggattacaggcaactgctatcatgcccagctaatttttgtatttttgtagaaatggagtttcaccatgttggccaggctggtcttgaactccttacctcaggttatcagcccacctgggcctcccaaactgcttggattacaggcatgagctacagtgcacagcctatttctgactatttcttgacggccatccatgctgggggaacaccctcatgtgcctgtcaagcccaaatcccactctaaaaattcagattcccttttctgactccgtaggatgcctgtccacggaggtctcataaatccccaagcccacattttccccaagtcctccccctgctggttacctttcctttcccactcacatggagcaggtgtccgaaacaatgggttttgggcagaaaacgcattttagtcaactgttgtataaatattctaaactagtaattaagattttaagcatgtgctctggctggtcatggtggtcagattgcaaacagttggcaatcttatttcagcagtagactagaatctggtcataatttatccaagggaaaaaagacttgtcattaaattctctccaacggtcctaaaattttaatttatccacgcctaccttgtccattactgttttaaaacagctttttaaacgtctagattccagccctgtgtagaatcaaatatattagaacttagtcttgttacttggtctgaattggaaacatttccagtgcctaccagttgcacacatcattatccactcataattagttgtttaatctgaaaagagcaagttctgctccatcacctaacatctgttcacttttactcttagctctgttcaaccaaatcccattattgtcaggagaggctctggcagacttgtatcatttacgaatggtttctatttctttgtagatttctaattctttgttctcgtagctgctacattctctgataataaataacattatgcagttatttttcggaacttgtgcttgttttcaaaataacaagactaagaactaaagatttatttgtctgaagtcacacagtgcctcaaaacatatctcaaacactaaaaatattaacatccacaaactaacacctacttataaaaactctagcaattctgagagaaatggattatttacaatcctctctctgctgatgttactgttaaatgtcatattaactcccagttatactgaaaccattttaaatgttatagtactttgaccttggttgtgaaaataaagtgtctagtgtaattatttagggatagtatagttcctaattaagacaaaattttcagcaaagatgattaaaatttgataagcttttaaatttttgtgtaatttctccaaataatgaaatgatttctttttctaaaaaaatctataaatttccagactgaaatatgcatgtcagaataaaggaaaattttattatggatctgaagtttgctccattttataacacatctagaaaatttggggtactggcagagtgaacccacagaagagattctgatgaaactgaaagtggattggtaggaaaattgctttacaataatctctactacttgcttttcatgtaggggtttgggaattagtctcttatttctacaactttctatttaactgaaaagacctaacatcttataataggattacactttctggtagaattttcatgatacaattcatttaaactatgttctttgcatgttctgatgaagacatttcctatgatggcattttggtctttctatctccagggaagtcaagtgattggaaagaattttaaagagacttgggctgagtgcagtggctcacgcctgtaatcccagcactttgggaggcccaggcaggtggatcacgggtcaggagttagagaccagcctggccaacatggtagaacctcgtctttactaaagatacaaaaaattagccaggcagggtggcaggagaatactcaggaggccgaggcaggggaattgcttgaacccgggaggcggaggttgcagtgagccaagatcgcgccattgcactccagcctgggtgacagggcaagactaggtctcaaggaaaaaaaaaaaaaaaagagagagagagagacttgatggttttctcttgaaaaaataatctcttagccattttccactgccacgagtacatgtacattgaaattagtgatactgaatttatcattggcaagatatctaaataagatttactgtagattaccagcgcattaaggagctcctggacaaaacatgtgcacattttctggctgagaagtgcagtcattgaagatttgtagaccagaacataacatattgaaccccatatctatctatatgccagtgtgtgtacttacatattaatttctcctatgaaagaggaattaataggaaaagaaaagcaaggaagtaatgttcaaaacttccttaatggccaggtgcggtggctcacgcctgtaaccccagccctttggggggctgagaggggtggatcacctgaggtcaggagttcaagaccagctgaggtcaggagttccagaccatcctggccaaactagtgaaacctcgtctctactgaaaatacaaaaattagctaggcatggtgtcaggtgcctgtaatcccaactacttgggaggctggcacaggagaatcgcttaaacctggaaagtggaggttgcaatgagccaagatcctgtgccatggcactccagcctgggcgacaagagtgaaactttgtcccaaaaaaaaaaaaaaaaagcttccttaaaaacaaaaaaagcttatgttgccattatttgggctattgatttttttctagtgcaaaacatatacatatttgatatataaccttggaaaatacacaaaagacaataacaaaacactcaaagtcctgctatctaaaaataaacactttgcttctagagttacttttattcatatttttaaaacatatttataggccgggtgtggtggttcatgcctgtaatcccaacactttgggaggccaaggcgggtggatcacaaggtcaagagatcgaaaccatcctggccaacatgatgaaacccccactctactaaaaatacaaaaattagctgggcgtggtggcccgcacctgtagtcccaactactccggaagctgaggcaggagaatcgcttgaaaccaggaggcggaggttgcagtgagccaagatcgcgccactgcactccagcctggtgacagaatgagacgctgtctcaaagaaaaaaaaattatatttataattatagtgagtattccatttctgtgtcctgcctttttgtatttatctaaaatttaatttaaaaatttctagatttctctgtaaaatcctgggaaaatcaaggcaagttcatagtgatctatgagtaatctattgaaatagcttggcattacataaaagcaatcccttcaggtctgaataaaaccataaatagaattttccttttggcatttacttcattttagactcatttaaatagtaggtttatcaatgcagtttattctgagcagagggatgatgtaatgtataatcagttactcaagtcaaaatgccaggaaagtatatgaataggtagcaacaaggtattgggttgaaaagaaaatgcttggctggctcttagatggcttgccctttagttgctactttccttggaccctttccagggtctccaagcatgaaggacccatctctcaggaagaagtccttgcccagggctgtttatcttagttgagtacagccaagtacaaaccagagcgaagttgggtcttgatctcctattgggtgccactgtctctgctttcttttatggctaacaagcctatactaccacaagccacatttcatttgatagcatgggtagtggaagagagcatccaaagccagtcaatcctaaatcatgtctgcaaaaatatctgtaaggataaggcctggtggacctcaagaactgtctccctctagtaataatcatataacattattattttgcagtgaaaaattatccagtacacaagcagtctatgcaatgtaatgagaagaatgctttgcaactgtactactagaagcgaactaattcatgatttatttttaagtgattagaacccttagtttatctgtgagaacatcacttaaataaaatgttttaaaatatgcaatgcatatgcaatagcattaaagtattaaatagcatcttaaagagcaaaagaaactattaagaataattaagtggatttattggctaattggtgtttccacatgtagttatttctgcaattattattcatttgctgatttacatagagctattctctaaaattactctggcattaaatgaagttagaagacatctccagtttggaaaatctattaagcaaatccttttcaacttaaagttgaggtgatactgaatcaaggcctggcagaactgactacagactcagagggagtatgtttattgcttttaattcttcctatttctgtttgaactaacatggcaaaggctttcatcttccaaactacacttatccagtctataaaacaaagatgatattgtttcaactataaagcacagattaactttgggaggctgaggcaggcagatcaccagaggtcgggagttcgagactagcttgaccaacatggaggagccccgtctttactaaaaatacaaaataaccgtgtgtggcggtgaatgcctgtaatcctagctactcgaaaggctgaggcaggagaatcgcttgaacccaggaggcggaggttgcagtgagccgagactgcaccattgcactccatcctgggcaacaagagcgaaactcagtctcaaaaaaaaaaaaaaaagaaaagaaaagaaaaagatcgggtgcgggggctcacgcctgtaatcccagcactttgggaggccaaggcgggcggatcatgaggtcaagagatcaagaacatcctgaccaacattgtgaaaccccgtctctactaaaaacacaaaaattagctggggatggtggcatgtacctgtagtcccagctactcaggaggctgaggcaggagaattgcttgaaccagggagtcagaggttgcagtgagccaagatggtgccaatgcactccagcctggggacaaagttagactctatctcaaaaaaaaaaaaaaaaaaaaaaagaaagaaataaaaagcaaatactaccaaattcttacctaccagagttacgactgctataacccttaacatttaaacaagggaaatcatcatttgggaattgtatttcctcttcatacaaactagtcttccatggtaatagattggctggatgtttttccagtatgttttctagataaatagtccttggagccattgtttccctaagaattaccaaaaaaataaaaacagaaagcaaaaacatgtttgctttctgctggaacatacatctcaggcagtgccgaggactaaagataaatttgatacctatggaggaatacattctaaaaataagattttatatctgtttgcatgttaacaaaacttatttgtaaagacacacattctagaaagtaacctcaaaagtactcttataaagcacctcattttgaaagtcaagtagagcaattcctgggcagatgataatgatactgcagagacatgtgaagaaggaaaaaaaataataatttcgctccctgtgttagtctgttctcatgctgctaatgaagacatacccaagactgggcaatttataaagcaaaagagatttaatggactcacagttccacatggctggggaggcctcacaattatggtagaaagcaaaggaggcgcaaaggcacatcttacatagaggcagtcaagagggcatgtgcagaggaactgccctttatcaaaccaccagatctcgtgatacttattcactatcacgagaacaggatgggaaaaacccactgccatgattgaattcccttccactgggtccctcctgtgacacgtgtggattatgggagctggaattagagatgagatttgggtggggaaacagccaaaccatatcactccctaagactattacatttcagcagttagatgaagagagaaggacagggttcagattgaatcattttggatggaggagaacatataaataattgaacaataggagcaccacctagtttagagacaacctaccacaggcaaatacctcacatgacttcattgttctcccccacaccttctctaccatcagatttcacccagaaccctcatgtgccacagaacttcaagtaaataccagccctggaatactagtcagaaagctgaaaaaaacgtgcaatatgagtttgaacactctgagatcgttaacacttttttcaataaggttagataactaagatgataaataaaaatattttaaaacattaataaagaggaaatgattctcatagaattagtatagccaaattttatcttcttaattgttgtatttcatcaagagacatagataggattaattttggttttctactataactgcttccatcagggaaaatagattaatttctaaaataccaccagaatcttagagttgtttatccaagaatctctaaagacactttacattgcagagtaagtcaataacatgggcaaatataaagctagggaacatgtgaaaaataaaattatgagttacaaacattaaacattatttcagtagaaacagattggtggctgcagttgattattaaagaatgccattaagttgtcaggaataactgttgtagttttctgaaaatagtcattttgttgtagctttagattggattagctagagctatacacacgagagatgcacatcaggccttagacacaaattccttcaggaaaatgattcactggctatttagggggttgacagccagtatatgttgttttcgagtcacagagaaaattgtatggttgtatattctgctttaatttacatcaatggaagatgagctacaaagcagctattgatacaaaaggcaaacccattgtagaaaatgaacattttctgtaagctacatctacattcttcctgatcagaaaataatacagaaagtgacatacttgttcctttttcacatttgaagaaaatgttacaaatgcctccatgatgcaattctgtatttagacaatctaagcattgagtcttgggatacttattctgtaactattttctaagaataacctgaatagaaaacatggaatttggtagtaaaagatataaataatgaaaataggggtagggtcctgtgcctcagtgaagtttaaaatttaattgaacttctaaataaatgtttaaaaatagagcagtttcaaaaatacaaaagctagaatattcatagacccctgaagatacttctacagtatcccacagttccacaatctctgattcaggaaattacattaaaagttatatgttggcattttggaatttcatttggtatacatacctgcagacagaggcaataaaatcacatcaatggtcggttacaaatgaagtcatccagttgacccagggtatgctttggctaaattttgttttagatttgccctaaaatataattgcaatattgaatatctctaatagatctcaagggccctctattagtccattttcgtgctgctgataaagacatacccaagactggacaatttacaaaagaaagaggtttattggagttacagttccacacggctggggaggcctcacaatcatggtgaaagtcaaggaggagcaaatcacatcttaggtggatggcagcaggcaaaaagagagcttgtgcagagaaacctccattttgaaaaccatcagatctcgtgagactcattcgctatcatgagaacagtgcaggaaagaccggcctgcataattccatcagctcccacgggttcctcccacaacacgtaagaactgtggagttacacttcaacatgagatttgggtggggacacagccaaaccatatcaggcccactttgcaaaatatcaaaacagaggggaaaagtataagtaactgaagagaagggtgcggtgtgctgaatacaaagatgctgactggggggagtgaatgtacctgcatcccaatttgcctgggaggtctggttttacccattgtctgacattctgtctaatttagcatttgtcctgaatatttcatttagtgatgtattattgttattagttgcattaaaacaagccaagatggattaggtagacctccacgttgtacttccagtttcgtcatgttatggtcttgggggtgcaggaattcccaggtttccttgaggtgaaatctgaaagctgagaaatatagcacagctcacaaggaagaagtggataaaacagtgtcctcagagcagccagggaatcctaacccctgacgatcttcagtgaggcatttggtactccaacctgttgtgccttagccctgagccccagtctgtgaggtgcatatggtcctagctaataggtcagtgggaaaagggagaaataataaacgaggctgtgtgtaaacttacgtgtaggaaacaggttaagctgttctgccctgttgcatgcagagagtagtctgaatgctattgccacagtggttttatttttattgtgtgatgtaaccatatgccaatttttttctttgactattgactcactattttataatgcatccttctggcaataatgaaataaaaattagtaaacagaagtaactgtttaatgaaaatgaagtatttgtatttctatttatcaagaaagaaaagacgaacctgtggcatgcagagagtagtctgaatgctattgccacagtggttttatttttattgtgtgatgtaaccatatgccaatttttttctttgactattgactcactattttataatgcatccttctggcaataatgaaataaaaattagtaaacagaagtaactgtttaatgaaaatgaagtatttgtatttctatttatcaagaaagaaaagacgaacctgtggccgagcacgggggctcacgcctgtaatcctagcactttcggaggccgaggagggcggatcacctgaggtcaggagttcgagaccagcctggccaacgtggtaaagccctgtctctgctaaaaatacaaaaattagccgggcgtggtggctgatgcctgtaatcccagctactcagaaggctgaggcaggagaatcacttgaacccgggaggcagaacttgcagtgagccagattgcaccattgcactccagcttggggcagaaagaagagaaactcagtctccaaaaaaaaaaaaaaaaaaaaaaagagaaaagaaagaaaagaaaagatgaacatgtaacttacacaaaacacttgttgccatttaccatggggatataatgaactaacattcagaagtcacacatatgctgaagaagcatcaggatctacttcaaaagttaaaaacattaaaaaaaaacacagaaaaaaagagtgcatcttaaaatgacttaacacacacaactgcagaaggtggagctacagaacatgcttggaagcacgactttttatttagatcagatgattgttctttgacattaagttagctcattggcaatttcatgatttcttgtgcatatcccaaaatgaaatgacacctgttaaagtgccagcaccgttagcaaaagaacatttaaaacagaaagtggtgccagttttatttcaatgtcatcagatgttccaaacagaaaatcactccagttaattcttgtaatggtttcgttttctcatccaattccgaggaagaaactaaagctttttgaaattaattctgttgaatgtattattcatactattttaaattcagttaatatttagcctacatttctagcatttgtctaatattaacacagtttttggtggagtactgcatcatgaagaaacctaacactctgaaatttaaagatacgaaatttacttggaaatagtttttatgtacatataattcatacttacatccaaataaatgttgatagtctctcaattaaaataaaagctgtaagtttcaaatttttgaaataggtacatatacaattggatcatctgaactgtgaaattttgttaggaaggtaatgttgactacaaaaaaaactcagaatatcaggattcactttttctctctgctgcctttcttcggttggattttagaaacgttcatgagtgtttaatcttctgtgcttttaaaattcttctgagtgtcttaaaatagtactgaagttttcatgacagtcttttcatttttggctgaatattgttttaaaatcatctagaaatctttcatcaaagtaccagtgaatggaacagcaaaagctaaagatttcaaagcttttatcaaaatgcgattttcgcaaacaaattatgaaaataggaaggcatggatatgtatctgcaaaggcaagggagaaactaaagaattgtagaataaagctcaaatattataaaatatgtaatttgaaaactccaattgtgttttgaaatattcagtttgtgggaataatagtttgatgaagtttcaatttttaattaaataaatttatatagagcagatataatgaaattgaagacttagtaaaactttcaaaaaaatcctaaagacagtttatttgatgatttttgacttttaaatatttgttaatgaaaagtattcttagtaaaaaaaatataaaatatttgggctgaaatatttaatataaataattgaattgaaaatattttctgtttagcacaagctctgagcttgttaagtaccttgtgcctgtgggagaagctagtctttaaaagtttaaatattggccaggtgtggttgtctcacacctgtaatcccaggcgtgattaatttgggaggctgaagcaggcagatcacttaaggacaggagttcaagaccagcctggccaacaggagaaaccccgtctctactaaaaatacaaaaattagctggtcatggtagcccacacctgtaatcctagctactagagaggctgagaatctcttgaacccaggaggcggaggttacagtgagccaagaacatgccactgcactccagcctgggcgacagagagagactctgtctccaataaatacataaaaataaaaataaaaatttaaatattattgattaaagataagaatgaattagttttgtcactaatttcatacatattaaccatatcatgccactttgaagaagattgtaggtaatttatgaaaaatgttcaaataagactgtatttttttaaatacttttcttagaaaaatactagtgatatactattaaagacagataaaactttaaaaaattgattaaagtacttgcattctacttattttaatgttcagattgattttatgaagaatttttgcgttagtgaatgaagctttgtgttattttatattttagaaataattctagcatagcatagaatattttataggtatacgaatataataaaaccagaatgttgttcaccagacgaattcttcaaaaaaaaatacaatcttcacttttagtctactttcttactctcaaaagtatcctaattagtctagtgctgaagagtttcaaactcatttaaagagaagtagacaaataagtgacaggaaggattgccgtgtgtatcttccagtctggggtgatgtttaaattcctcagagtccacttagctttgtctcttcaccagccttggtttgccccagtgctgttcatcattttaacaaaaatagatctcacaggatgttcacccagtcacctttttgtagggacaagctttatagtcctagcacttgctgattctttaaatactgtgctttggtccaggggatgttaccttaagcccattttttgtagttagtaaataagacttcttcccaaagtcacgtgcatgttcaagttcttgcattgccagtgtgtaatggataaagacaaatgtatagtaaaaaaatcatgaggcagtctttggttctcatcccagccctgttggctgtgtgatatttggcaaattattttacttctctgagcctcttttctttccattgtaaaatacagagaatgatagttaagagtatttttgtggaaatgaaccaacacaatgcagctcaagtatcttagcagagtgcctgtgttcaataaatattaataaaatgacccttaactcccctcagcaagtttaaaaacaggaagtttccatttcaccatttactttccaattctttgttaaagatggccataataagtaatgagagtgtgcatttgtaaatgtctgtcaccaatgtgaatttacttgagatgactcaaaccacattctatactggaaaaggtgcatttaacgggcaaaagaaaagcccaggccagtttctttctgtatcaaccctgggtaaatctccttaagaaaaaattaacaatcatgatttattcatagggaaagaatttaactacttgttagcattcgaatgggtcctaaggaaactcccaagttaattaaatcagaactttcttcttgagtttgatccattatagtgagttaccagctgggtatcaactgctttcccagaaaggccccattgaaattaatggactcagggctttgttgagtctggacactagagaattggacaaatgacactgtggtttattaaagaattatgactgcaaatacattatatgatgctttctccctctctctccatttaattatgaatctgcctctcaaaagccttgactctgtattttaaagttgacataaatggtaggacgaggttactttttccagtaatggagaaaggaggagaaaggttgctccgaattttgtgatcttgttcattttccgatgaagtttttttgctggtccaaatattaattaatcgattgattgaaaatgctacaaaagaggagccattcatcaaagaaccaaatccagtgattcgtgatctggggttttatcacttatatttctagagcatccttttgcttttacaacttaaatttaattgaaattttaatccctagcaggtttttaataatgggcagcttttgagacattaaaaaacattgctctcacttcccagataaggaggttgtccagatatccttatgctttagggagcatttactaagtgatggtacttcccagcgcacatttttggttttgttaaagtatcttaaaccgcccatgtgtagtcaacttccccttatggaatccattgataaatcatggcaaaaggaaaccactctatggaaataacgtctaaaggagaccctctttatcccggagaggaaaaccagagagcagtcacaatctggctaacataaaaagaaccactccttgatgcaaatcaaaagactagatgtagctaattagacatgggaaaagggtggttctcctgaaaatctggggcctcaggcattttctggaatgtgtacagtcagaacgtgcaagttagtcagcaaagagaaaacaagcagccacacctctcccaaataccgaatagtcatccttcttttgtggttcagaggtgtttgtttgtcttagaatgctgcaacttaaaaccaattgattttaaataaaaatggtaacattataaagtgtgaaagtgtggggttaggaatcatttcccaccctgtgaaaatggctctatggtcacccaggggtttgtgtgtgtgtgtgtgtgtgtgtgtgtgtgtgtgtgtgtttgtgtgtttaacctgtgagataagaatggtcaaccagttgactcctcaagaacagtctagattgctacaggcatgaagttgctttgagagcaggttgaatgcccacacatgtaggtttggtagaggtggtggtgaaagcggtgagcatggctgcagggtactcatgccactcactcctttttgttacctctcacaacctctctctgtctccatctgacatgcctccctagactgtctctaataccattagaaacttcagcgcaaattgtgcaacctctccgacactgaccacaaaccctttccagcctcagaaatgttcatagatagatgagggttatcagggttgctcagccagtgaactccgaccacgctgggtgaggctacatttgtaatctgttctggaaaacgggaaccatgctccattttcaacctgcactcacccactcctatttctttctagggtgtctctgtttttttgcttttaaccttgggtttgactttttccagtggacatttctaactaggaaacttgatggtttccacttagattcccttattctccaacttaataaacatcaatacatttagaatccttcgctttccaagactctaactgatttgtggccacagtgatctttaaaattcattagactttcgtcattccattttctttattaaggcatccatatgagctgccatgtgtttgctctctttcatatatctgaatttactgattgttgtctccaaaacatgttctatcttagacactatctcatcctcttctctgccagatattgattattcatacattctctgatcccaaccaccagctttactcattgttatgtctttgtagctttttcttcccttaaatacaaggacaacctattatttccacaattcagcactttttactgggtcttttacctctctaaacccaacaagagcatcaaagcatgatgttgggcttggtgcctctcttccaccattctttctctttttaactccacatgtgtgctggactcttgcttatgatcttccctgtgtagctaccaccacaaaaatgtgtccccggcctttacaaatgaagtgttcagatgcaagccattctcttatagacatggcagtaaagaccaattaaaaaagggggaaaattggtgctacaatgtcactttgcgggagaatgatgtctgtaaagtgggagcctatgtcttgcaatatgctgatgccctggttgaatagaccaaactattcattccttcctctatggcctggggagatctctctccatcacacctcagtgaagacagctttgatgcatttgactgtggtgccttgggcctcccagttttcaatttttatttgtttttttctggtggctgccttcttgactgctgatgtgtagcttatgaaggagtgaaggatgtgccatcccaaaatatggcagattggtatattgagtatttcaagttgaaaacattggagacagtgtagtttcagaaaaggaagtctgacctgtctcttcctgcatgtagcacaccataaagattcctctgggaggggtacccttgccttaccagggcgagaaaatagcccttaattaccagagacttggaactggaggctacactggacctgatatatacacttaacaaagtaacgcttatgtgcctgtggttttacacccccccaccccaaatatctcctagtgactcccctagaaaatgtactgccctggccagattttctttttgctgtcatttcttctcaaatgtattatcattcattgtctaaaaaatataaaagccccttcttcagacttcactgtcttgtgaagatcttcatgtacacgtgaaattaatcaaatgtgtatacttttctcttgttaatctgcctggtgtcgatttggtttctaggtcctgctgaggagcccactaagagctaaaaggaggattgggggtgatcactggctctcctacagttatgccctattgttttttttctttaaataccttttccaacaactcgaagctcagcagtatggtggacttcctcccttgtgcatagatattgttgcatcatttctgtcttccagagaactacacttgctaagttcagaatactttatcagcttactttgtgtccttgttcccatggtggtgacaccgatcttgaagcttaaaaaatcccccaaattccgcctcccacctctgtgacactcttttgcaaaaatatgcaatttttctacacacatttctgacaaaaaggaaaaaaatgttaagtccaccctagttctgtccagacaagcacagagagaggcgtgttagatttccagacaaatattttcgcctagattttgctcaatgaacttgattcactgcagggctttttttcccacaagcgcgtggcagaggtgggctgccacaggagtggccagtgcccgctctctgcagggcactgctatgaatcaccattttcatgaatggaaagaataggaggaggggaaaaaggacaagcagcttgttgctaatgccctcaaacaaggcaaacattttgtgaataatttttagataatatatgacggtttggatctttggttttgttgttttgaatggaatgcatagaaaaaagaacttgtttcaacaaaagtttgatctgatatcctattcatgggctgattctttctcaaatatttggcagctcatccagggcacagaaaaggcacagtgttgaatcatgttgctttcaagctctgtatcagtggaaggcactggaagggattatcgatcccacaaaatacacaaggaaagtatgtgcccacttcatttctgaggaaatttagggttcagatggaccttgccatagactcagtgtctttagtagaggccaaataaataaataagccaacatagatgccaggcaacttaccatacagcatgctgaatttcttccctcatgtctggtgactggttttatagaacccattcagtgagaatgcaggagaagtctaagaattagaaggaacaaagaaaagagaatgagcacgggaataaaagtaaataataatcatgtctattcttgattctggggactggctaacttctgtcactttaaaccacttcacctcatttgaaagtccaggcttctcagcttgatgtccaaggttctccatgacacatatcttcttgagcacttcacttcatgccccgaccaagcttggacttcttccccctcacatgcttgctgtttcatgtttcatgttttagctcatgctgttccctctacctggaacatcttggttcactcaactaattctacccatcagaatttagcacaggtgtcctcctctcttcatggtcttcctaaatacctcttgggttcattattcctcttccatgttcatagatcaccctgggtattactctgtgctagcactttccttctttctgctatgtagtaccagtcaggcactcaggggaaacgactatgccattcactcattcagtcattcattcattcattcaacaaagacgtattggattactattatgttccaggcactgttttagggactgaagataaggtggtgaacaagacagataagattcctgttgtacaggagtatgcattctggcagggggatagattaaaagggaaatcaataagctaacacgttaagtgctaccgataagatgaaaatatgtcaatgggaagaagagtgcctgctgatttagactgggtggtcaggcaaagctttgccaaagagatggctgaagctgagagttcaaatgcaagaaggagtctatgaggatctgggcacggagtgtctgagttggaggaaatgcaagcacaaggccctagaggaagaatgagaactgtgagctcaaaaacctagaataagccatgtgactagtgaacagcatgtcccagcaaaagtcacacttagaaaatatagggcctgagggtcacaggaaaagttgtttattctttacctgatgggaaaccttgggacaattctaagcagggagttggaagacgtgatttatattttgcagaaatcaccaaggctctgcatgctgaatagattttttctttgcatccccagaacctagcacaatgcctgcctctgtttcagtagggcccagagccgtgctgcttttccacacaggaaaattgccttttccaaggtgcatggctgcccagtagagaggaaagctcaaagtcatatcaattcaacacgcagtactaagtctctcctcttgctccattttctactggcctgtgaccaactacttcctaaagttgaaattgcttccgatttcttttttctctatttcatggataatccatgcagtgtttgctcaacctgtttacactgagatgtgttgaggaactgtcccacggcaagaccacaaggtggggcagtaatgagtaattggaagaaaactgcggtaccttctaaagctcaaatgtggctttctagaacacgatgaagtggagccctacattcattatttgaccttgtttgtttttttttttttttttttttttgagacagaggagtctcactgtctcccagactggagtgcaatggcatgatctcggctcactgcatcctccgcctcctgggctcaagcgattctccagcctcagcctcctgagtagctgggactacaggcgcaagccaccatgcccagctaattttttttttttttttttttttttagtagagacgggatttcactatgttggccaggatggtctgaaactccggacctcaagtgctccacctgcctcggcctcccaaagtgctgggattacaggcatgagccaccatgcctagccctgtgactttttctcaagggcttcaaacagtccctctgcaagttaacctaggcatactcacagagcaagaaggcattcatgataccacaagggaggtgaggtttgtgccatttgctccatgtcactgaggcaggacagccctgtgtggctccattcccacgagagaccgtcttgctccgttaggactgcctcccacctgctaagggtgcttttcttccatggtacagtgatctttaatcatttgtttcaaaaatgtaccaacctcccgggaatgaaactaaccaaacttccctccctccctctctccttcccttccttccttccttccttccttccatccttcctgtttgccttccttccttccttttggattatgttgtttcattaaaatatatttagctgggcatagtggctcacacctgtaatcccagcactctgggaggcagaggtgggcagttcacttaaggtcaggagtttaagaccagcctggccaccatggtgaaaccctgtctctactaaaaatacaaaattagccgcgtgtggtggtggacgcctgtaatcccagctactcgggaggctgaggcaggagaattgcttgaacccaaaaaaagcagaggtttcagtgagctgagatcgtaccactgcactccagcctgggcaacagagtgagattccgtcatatatatattcacatgatttaggaaattctgtatttcagcatcacagtataaagacttaagttctaagagttgatattgctgtagatgttgggaatggaatcttaggagtaacctttaccggaggcaacttctactgcccttgctacctttggtgtgacctgaaaccccctttcttcattagtaccaagtgacttgtttgccactactcagctgtcccagaatagcttgactccacacatccatgcatttctaggaagaaattaggtgcattataaataacgagtcctctgaaaatgccgaagtgtcttaatcttttgaaaaaaattatctcaaatttacattcacaaggagccatgtcttttgccactaactgaaactcagtaacaacactgaagtatgagcttgggccttgtctgacaataaaaaggaaatgctaggtcccagggaccacttcaagatgtgcttgttcctttaaagcagggagttgtcacatccaatttttaacacatatgtatattttaacacatatgcatattttaacacacatatatatttctgattatactgtaaaactggtaaattatttttaaaacatcataaggcccccaaatcccagagaaagttgtttctattacaattttagtctatttgtctcttttaagtttctcttccctctgagcatatgtatctctaatgcatgtctgcttatgtaggcatatttatacatacaccctttcttttacaaaactgatatcaatttttgtattttaaataaaatacaaatgttttacattctttctaaacaagcagacactacttttggcacctcccaatgctggccaggtcatgttaactacccttaatcagctttttttcttgcaatatttgtaatatgcatcatctcagggcaagagacaaattagatcatttgaagattaataaatccttacctctgtttggttgcacttagccagcaaattcatcacatgcttagtctttgctttattctgggccatgtagactagctgttaagtggaaaaaaaaaaaattcttcttcggggcagagtggcaggatggctctttggaaagagtcttggagcaggagtcaaatggtctggctttacaccccagctatgcttacaaaagctgggtaacttgcagttcccttaccactaaagtggaaacatggatgtctaaagcttttttacagctagaaaagtctatgcttggttagcattgtgctgatgcaattctgttccagataaccgagggagggaatggcggtcctcgcgtgaagactaagtagacgtgctattaccctcctcggttggctccagcaataagcctaatgacctctacaaagctgttctgtaatacagaagtaaacacttactctgcacaatttctccttgcatgtgcttcccactggtagaacattattcatcttgttggtctttccaaagagattcattacttccttgctccttcttattcatccttcataatagaaatgctaaaagtctgaaagacgaggaagggagcacatttcctccctgcagtctgaggaatggctgtatctcttcatgagcaccaagaggaagcccccagatgggtccctgtccttacagccttgtttccatgtgcatttccaccccagcctcttccataatcgctccccatctctatgccccagcgatgccagttgttccatcaaacactgtcctctctgttctcagcctcggagcttctgctccctctgttaggggtgactgattctcaccaccaccaggctaattctgactgttctggtttcaccgcggatgtcacctcctccaagaagctcttctcgactttctgcctgcagaccctcatctaagctttcacaacaccctgtgttctgtgtttacacccacccaactttttcttttttaaattttattttaagttctgggatacatgtgcaggacgtgcaggtttgttacataggtaaacgtgtgccatggtgttttgctgcccctatcaacccttcacctagatattaagccccacacgcattagctgtttgtcatagtgctctccctctgcccacccccctgacaggtcctggtgtgtgttgttcccctccctgtgtccatgtgttctcattgttcagctcccacttatgagtgagaacatgctgagtttggttttctgttccttatgttagtttgctgaggatggtggcttccagcttcatccatgcaaagcactggatatcattcctttttatggctacatagtattctatggtatatatgtaccacattgtctatccagtctatcattaatgggcatttgggttggttccatgtctttgctattgtgaatagtgctgcaataaacatatgcacactcaccgaactttgcttcactgtctatcagaaaactgccagtttttcagttgcatttatctcctagaatataaaggctttgaatagatccaatggtcttgtttaccattgaatctgatacctaacatggaatctgacacctgctagacaccctcagaatgtctgtgaaatgatgtaactctacgtgatgtgtgtctactcatagctgtaaaatgagtgagccctcctgtaggtcacagtgtccagcagactggcagggacctgatatgaacatcacagaggaaaaaaacacatacgaaacaattaatgcttgccattgggccaaatgctttgtatgtgttatttcatttatatttttatttaatactaagcagacttcatgtaccctgtattttgctaggcagtggagtacatagaaaggaacagaaactgcgtatcttgtcttcccaactgaaaggagacgattaacctacttgaagatgttagaatacaaatacatgatatctgaggacagggtgaagaaaaacaaacaaataagaacatgaaaaactgtgtttgtcttgactattcaggatatgaaagtgccgcaacattcatgtatctagaaactccatgaaggaatctacacttagggcttaaagaatcctaagggaccgggcgcggtggctcacgcctgtaatcccaacacattgggaggccgaggtgggcagatcaggaagtccagagatcaagaccattctggccaacatggtgaaaccccatctctactaaaaatacaaaaattagctgggcttggtggcgcatgcctgtagtcccagctactcgggaggctgaggcaggagaatcgcttgaacctgggaggcggagggtgcagtgagccaagatcgtgccactgcactccagactggtgacagagggagactccatcaaaaaaaaaaaaaaaaaaagaatcctaaggattcctggttcctgacaggtgcttgttccttgaagtatacttgtgccgggaagcaaatcttctctctctcgttttgaacttggaggagacagcagctcccttctccttttcatacaggttattgtttataagagcaatgtgatgaaagcttcctctgctaagactgcaactccagcgttaccttttctttacctcaccttgatcctcggtgtgaaacttcactcattactgatgcattgcaattaacagatctcctctttcaagacacattagggtatgttctgactatcagctccaaaaaaataaaataaaataaaataaaataaaacacattaggaaatttaaatgaattagtgtaatcagctgagatagtacttgaaagggaccgtgtaggcttgtggtggaataggtactttcagacagaagtctctagaatattcctgaggaagtattttctcctgcccttcaatgaatagagtggtaaggtttgtgaaaagcaggcctctggcctgagttagggaaattatatattgtttgtccaaagtagtaaactctgtctaaaatgaaactctagactagatattattttttgatgttagatgtatacgttctctccatgatttagcagactttccagggaatgatgagtctcccctctactgaatactataaacatgttatctcagtgggaaaaatagaaagagatccagagaagaagagggaacatcttgcttttgaagcatctctgcttacgagtccataggaaataaattacatttcccagggttctgatttggtttttaataacttactggccctgctaaacaagacactcaggagaaagtgcatgtgaatagatggagatctacatttttagaaaatatgtttctttcttttgggatcacaatcagaacataggcatcattgaaacaaagccgaggaagaagaattttctcatgctatgcagaagttttctgttaaagatatcagaggctttgcaccctgagagctgtaatcttctctccttgagttcttcattgagatttactgcagaggcctcagatgtgtttatttctattatccagttgctcctaatattacttgcaattgttttggcatgagggttagaaattgcaagaactcctagctcgaaatcacagaacgtacacaaagacaaaacagaaataaagcagaacaaatgcaaggataaaatagataaaaatatctccccaccctaattgtgctcttttaaaggaatgctattgaaatgacaaatgaaggagatttctacctgttgttatatagctgggcagagtgacatttttggctgtattctagtgttgagcagttgcaaagctttctttccccctgaagcagtagagggtgctatgtggatataattgaagagatgctaagtttctatatgacgccagggcttagggactgccctctcttttcaagccacttgcttttcccaaaataactaagaaaagggagaaaaaaaatgagtacagaggccatgctagaagacatagataaaatattaagtcttaagaaaggtaggaaataatcagattctaaagttctcacaaggtttggtattttgaagtatttggcagaaggcaagggtatggaaaactttaagaaattgtaagcttaggactttatcgtaagcttaagacagagatgttatctgtctgaaaacagagggaaaattttgaacagagtgattcttgtaataagagaagacttttgacaagttatgaattccttgaatttcattattttttcttgctgtttaagtagtatatattgtatatttgatgacagtcagattttactgatagagatttgaaatatattttgatagggctacctcatgctttttgtagaatcaaacattttagagctgttcagccccttggagccattaagtacaatcttaatgtttttgcataaggagacattggcaccaagaagttaagtgacttaacctgtaacaggctggtccaaacatccgagcctcaactagaaccagtgtccttacccctggtccaaagctctctgtcttttgctaccctgctttgagttacagcattttatatgctgacaatacataatcctaatacatttatatattgttttcacttacaaagcagtttatgtacatttttccacacttatgtaccaaaacgtcctttgaaaatatgttatttgttgatttactcaaagaagacttgcccagttttatgacaggctgagaagttaagtctcctgttgcaattccgtttgcaattcagtatccattacacctggtcaatcaagtttcttattaatcccacgttttccctgcctgtaaactcccttcttagtgaccgattttgctattttgtgtgagcacttgagtaaaattcaactgactcagagtagggaatcctggctggattaatgggattgtgtaacaccttcatcacttgaggcccagataggagtgactgtgcgatgtaaaaaaggcttgccaacaccactgatgtttgacgtgaaggtgaaaagttcagtggcccagagaagtgctttaagggttcttcttaaatctaacacctgaggaacaccttcagattatccagcagttgtgatcccctatgcagtgtctatttgtctagacttcttccccaacacacattccctagtacatttaaatggaaagaaaggtctgggaggttatttgcaggggtgttgatggaaacaggacccatcacagctagggtcatgttatcagagtgcagattttgaattcctttctgcctttcctgcatgactttaagtaagaaaatggtcaccttaaatttgcccaataagactcagcttggaaatcattcttgggatgcagaaggatctggtccagaaagcttcagagaagccttgagaactgcctattcaagaggagaagaaggctgagagagggaacctgcaaagatctagcaggaaaagagtcttctatgtgcaaacaacactagaccctttcccagaattggggcactaacaaaagataatgcctctgaaatattgggaaaattgttggagaatatgatctcgttccctatgctgtcactccaggtaacacccatgatgctcaaaggatttttttaaattaaaaggagtaccactttatttaacaggtagaaaattatggaaattattataccaagaaaggacataggctaataacataaattaggcttaaggagagtttcataaattatgtatctccaatggattaatgaaggaaattaggaataatttttatattatctctacttttttacttatatatttggacttgaggttttctgcatataatatgcacactaatataaatattaatataatgctaatacaaaggaatactctctcagagattgtgcattaatgtatgtttcagtgacaaaatatagtgcgtgaccttagccccaggaggaagaataggatatgtgaaagaacctaagattttgaacccaggataacctggttttaagcccaggtctgctacttaagagctgtacgactgtgagcaagttattttaaattgctggatcttgttttcctcatttacaaaatagaaacactgatatctgcatcatacatcatactattgttatgatttttaaattaaaaatatatgccaatgaacctagcaattggtgaccatattgtaggtacttcatggatatctgcctcttccttccatgtgcaaaaggaattctggcatcatcttttataattactaggaattttttactgccttcagaaaatatttctagacttatcctgctaatttttgtttagaagttagcctctgtttcagtccattctctcattgctataaagaactacctgagactgggtaatttatagagaaaagaggtttaattggctcgtggttctacaagttgtactagaagcatggctggaaaggcctcaggaagcttacaatcatggcagaaggtgaagaggaagaagagaagtctcaaatgactgaagcaagaggaagagagcaataggggaggtgctacacacttttaaacaaccagatctcaggagaactcactcactatcacaagaaaagcaaggggaaatctgcccccatggttcaatcacctcccacagggcccctcctccaacactggggattacaattcgacctgagatttgggtggggacacaaatccaaaccatacagtccctgaatatatatgtgcagaaatagactgctcacctagacttcaaaagacatgtcatcattacgcacctctgagacattgtatggtcttggttttaaatttcttgagtaatctggttaattctgatactagcgatcaacagctttggtgtaaaggtaggtcagattggtgatatattgctacagcaatttgaggaaatcaatttcctccctaaaagttttgacaatcttgtttatttatatattttatggtggtgaggggagaaattattcttgagatcttgcttctttgaaatatggttcttctcaggaatatcctatgttattagatgatctaaaacactgtggcacttcttaaataaccaatacttaagataccatgaaaattacaacccccgtgagatatagtatcaattaaactatgccatatacctcgattggttgagttccatccactagtcaatttcaaaattacctcgtaaatcactaagacaataggaaagaaagccttactataacttgccttactataacttgtcttactcccaaatttagcaatatctttttagcttattgatggtatttcaggaaaatcaaatgtagttccacattataaggatggagacatgtgttacctctttatgttcctgtatggcaaattagttgatactctttggtcttgtcgacatctctttaaccttgtaagattataaaggttagaatcatgtttaccacctgtaaaaaaaaaaaaaatctgacagcagtgggttttttttttttcttcttcttctttttctccaccacatcccctgataatgatttccatgggctggaaatactgggaggagagaaatatttagttgaattcattttaaatgaaaccaatagcttcactagtgatctcataacctcaaagcactttacaaactgagtaatcattgaagatgctaaatatagtaaatacaatgtttaaaaccttcacaaataaatccatattaaagtcttattctaccacaaagtagctttgcttttgatataccttttaaagtcatggatttcttgatggagatattgagttgggttgttcctgttgctttttgtttctttgatttttttttttctattatataagctagacctcactctcttagtcatttcattatatgtagagacaagatgctgccttaactagagctttattccaggtgcccaaaggtcttcatttagttcctagctcaattcgtgagtaaatatttcttttccagctttaaaattttttaaatgacattgtcaggcacggtggtgcatacctgtatccccagctacttgggaacctgagatgggaagatcacttgagcctggcggttccagtctgtagtgcacagtgatcatgcctgtgaatggccactgtactccagcctggacaacatagcaagaccccatctctaaaaaaaaagaaaaaaaaagaatgatagcatttcctttacttgtggagattttctgactataacatgcacactattattataaaataatagactttacaaaatataatggttgtagtttcatttgcactaaataacgataaaccttatttaagtgcaaccttattttatatatatatatatatatatacccattaatttgattgtttttaatgtagccatggacatggagagttcacaaattataatttataaatgtattaagatagaataattgcagaatagaaggatttttaaacaatttaaatagtcaccatttctgccacccattaatcctatatattggttctaggacttattcctggagttatatcctgcacattggcttcaggcatgaaggacttgatcccacatcttctccagtgggattgtggagatcgtgtcactgctggcctgtcctgcaggctcttgtggtgatcattataaaagccagccctggggtagctcaggacaggaaaggaaggatattctgaaatgattttctccttttagttaacacattttggttccagaacactgagcaaatcatcaactgaagccccatgatatattttcaaagagtgaatttctcttacctgactgaggcattttattctataatagcaattctctgggttttttttttttcatacttataacaaagcggattaatatatactcacctaagacaccaaagatactgatggctttcaccactctatctaagcaggagtaaacacctgggaactagaaatctgagaaagaggacaacacccaacaccacctaactatggccctcgatacagtcatttaacttaataaccttccgtgagagtaaggtcattatgaaatatgctcggttttacacaaagctttaaaaaaagccacataaaatagtatatgaggtcacctctgattcctatgtaaagaagattcctcctcccttccctcattcattgttctccacactctactccacacctcccctcaccctgcaatccaacttatcaaaagtttaattttccctttccaaaagcaatgtacttgaaattcctattcttagttatgtgcattttggtttcctctttgattttcctttttttccaggtttcctgttgataccaacatgaatctcaagggcttccctttgcttcttttggaaaaaaataaagaaaagagactgatttagagcctatagggtggaaaatcacagccaggaaaaggcaggcatagcatgcagcagttcagagacagggctcacccgcccatctcttccatcagccacctccctggtagggcatcccttggaacagaagccagcaatggtcctgcagggattggagaattgtgagctctaaatgataaaacgttgagtcataggttatcactgtacagagtgatcctttggcctctgccttgagggcacgtaagccattttttccttacttgttggaatttgattcatttcctctttttctcctttagctctctaatctagaattctcagtttatctataaaaggattcaatatctgggttgatcctgaggagtcaaagggttggttttgtgagcagatgggtggcagacaatagcttttgtagagatgcctctgaatgagcccacatggtggggctttgagaagcctagtgtggaatcagtaacaaagtccaccttggaataatagtaccatagtttcagtaactgctgattccaaaaatgtttcctatcacacatcttcctcatctgcctctcacaacaatcgtgtcaggagaaagctaatccaactataaagtggctacgtgatcagaaatgacaggatgggttcattgcaatgtcaagcctcagtagtttttcatcaaagccctcaaaaaaaaaaaaattccaccccaaactgattgtgtattattcaaccagacttctggtatcttcaggcacactgtttgcaaaggccaggcatctcttatgtcctgctgtctgtagacctctgtggtttatggatgggaaaactcaaacagtctgctcttagatggtccttattgcagaaagcaggcttatgccctgtaagccgggggtatctccaaatcgtgcaggaggagaggtactgattgctcatttgcttcttctgtgccttaaaatcaccatccttgttaaagaaatgcaagcattgagtagagaagtgtcttgcttgggcttgcttttgagtaccgggaattcagctttcctgctttggaaacctgagttgggatgtaggtgtgtagcaaaaggaatgggtggaggcttctaactaatggggaaggcatctctgaaacaagctgagatgtggatctgggattctgggaatcaaataattcttcccagcaccaaactttgatgagagaatactttaatgtctgtggttgcagaataaatatgattcactctgaggattctgcactgcaattgaatatgtcagaaaaggcaaataaaaaattggaaaatttatctgtaaatagttctcaatagttttagaagagcttccaaggacattaatttcttcctagccattatttattaaaaccttcaggatagcatctcattttttggccacactaatgtagcaactaagtgtgcaggccctggattcagagctaaatctgactctttcaagctgtaagcccttgagaaatctacataaatctctctgtgcctcattaatgtcaactgtaaagtgaggaataatgatattatgtattttgtaaggttgtccgaatgtttaaattagattataatacttaatattaattgaccactttggaagtgagcattgttctaaatgctttaagtatgaattttattgtcatcgccatccatatcaattatccttatttattatgctgttataagaagctttgatttcacaaagaaagaaattcaacacttaaggaggaggcatgagaaaacatcttattgaggtttttaatcatcttctagtgaaccaagcaagactgaacctttattgcaatgttttactaggctttatagcacttttaaagggtcaggtaaataaagtcataattcaaaacagctgttacggggtggggcacaatggcattgatatcaagagactctagtactgaatcagttacttcctatttatataattaaaaaatttttttgttgttgtttgtttgttttgagacagagacagctctgtcccccaggctgaagtgcagtggcacaaacgtggctcactgcagcctcaaactctcaggctcaggcctttcccacctcagccttctgagcagctgggactataggcatgtgctgctatgcctggttaattttttatattttgtagagatagggtttcaccatgttgaccaggctggtctgaaactcctgggcataagtgattctcctgcctcggcttcccaaagtgctgggaatataggcatgtgcccacacctggcctatttgtataattttgaataaatcatttaatcttgctgagcctcaaaaagcaagctttaaataaagaataaattaaaaattaaaaggttgaattaggtgatatcaaaggttcctttcacatctatgattctaaatattactcagtatttactctgtgcagaatgtctatttccacaggctattgcttacagcacaacacagtgatcatattcctctttcgtaactagggagctgagcaccacgatgctggctactggcagagtttatccctcagcccatattaagtctagaaatgattttgtccaactgatgttttctcttcacatcagatgtcacttttttttttttttttgatatggagtctctgtctgtcacctaggctgggtgcaatggcgtgatctaggctcactgcaacctccacctcctgggttcaagcgattctcctgcctcagcctcctgagtagctgcgattacaggcgcacgccaccatgcccagctaatttttgtatttttagtagagacagggtttcaccatgttggtcaggctggtcttgaactcctggccttgtgatctgccgaccttggtctcccaaagtgctgagattacaggtgtgagccactgtgcccaggcttttttttttttttttttttttgagacaaggtctcactctgtcacccaggctggagtgtagtggtgcaatcaaagctcactgcatcttcaacttcctgggctcaagccattctcccatctcagtctcccaagtatctgggactatatccagttatttaattttaaattcaccacactcagctaatttttgtattttttgtagagacatggtctcactatgttgcccaggctggtcttgaacttctagcctcaagcaatcaatctatctgccttggcctcccaaagttctgggactacaggcatgagccaccacgcgcagccagccatcacatttttagataaaacatcgaggaagtacttatactgatatatacattttactatagcaactatagtaaagagaaaccagtgagtcctaaaactgaatttttaaaaaaattagaaacatagagttaaaattaagattatactcaaagttcttcagagataagtattaaagtcatatttccaaacctttaggcactataaagaattccataaataagaggttatttaaaattaaaaaaacctatgctcaagcaatatctttgatcataagacaattctggcaatgagacaaattcttgaaatctcaacaacactaacatgggctcagatttttgctttcaataaatagaacctcatcaaagaggtcttggaaattctgctagtcaatggaataaaataatgaatcggatagaagtcctccagccctgtgctggaccgaaatgtctctgactgcctgtcatatttcagaggatcgtgctcctcagagcagtgtggggctggcacagagatgaaagaaagaagaggttcctccctggtttctgtttatttgaacctgaatcagaatagagaggaagcaaaggagaatgaatggtgtgatccaacttttcttccatatgtgaacaatattgacttatatggcataattatgcccagatgctgtcgtgacagggtgtagagatttctgacttgcataactgaatatattttttaaagacaacaaagaaaaagaaatcagtcacaacattgctttagcatcttgagtcttggagtgcttctgccatggaaagttatagtctctgctcttttctgcttagactgtatcttaaaactagcttcaatattggatggcctattttaagggagatcctgacacttagtatccaaattacaaaagatgactaggttactgaggatctgaagattgtcccatataagttatagttgaatcttctgtggaagtttaacttggataaaataagcagagaaatgacaaatgtgttcacatatgtgaagatcatccttgtttttcttgttttgttttgttgttttatattctaggaagcacagtggaatttgaaagacagactttagatcaccatattggagacctttataacaattaaaacataggaatggggcaggaagccttattaggtggtgagattgtgagattcctctgctgttgatggagactagacagaggccagatgaatgtgtcaataatgttgcaagcactgcttccatattggctagaaatttggaaggttagaaaaagtcaccaactctatcatcataagaaaactgagttgagggcagaaagtaatatgatatctgggttttggggaaaccagttacctctcttcaaatctttaatgtggaaagaatgaaaccatcttagacctttttgagtacagaatgacttgaagtcagaggaaggagcatggcagacacagaatgtcccaaattgagacagcatcttttaagcaaattgttgtccctttgggtagagtgggaataataatatcgcactcacatttatctcacagatgctgtgagggtgtgtgactcagtgtttttaaagagctttggatacctgctgtggttaatgtgtcactcactgcgaagctttccaaggcaattattttgatcagaatgtcactcagagttagtaggctggcttcatgaatcatttggggagggtagtataattcaaatttgttatgtattgtcaaacatttaaaaagaataatagtataaaacaaaatacttgcttttacactaaaatttaacatcttttttttttttttctgggaaaatagaatgttgcctaaactgaagtccaaacaactttactttttaccttttcaaatatccatgtggcatcaagccaggccatttaaaatgacatccagttatttaattttaaattcattttgtagaaatcccacctctctggggagtatgtacagcaaaagtaaggccatcacaaaagctgaatgtcccaaagtggtgctttttagcagaaaatgtaatttttttaagatgaaacttgccttcagtgttcttagagagtgggttccatattggtttctgaaggagagtcaagcctggtctccacagtgcactaaatgcagtagggggtcaagcaaatgatgggaaaagcataaatcatcttggaattatagattcctctttgctgtttgactttaaattcaccatctgctggctgaatcttgatgggagttgaacataaacataaggccagtgcatgactgtgacgtggaaggtggaagaaagttccttctgacttgttaaaacccttaaaatctacacattattattattataatttagacaatgtctcactctgtcacccagactggagtgcaggggcacgacctcagatcactgcagcctcaacctctccagctcaagcgatcctcccacctcagtttcaagtagctggcactatgggcatgcatcaccatgcctggctaattgtttctatttttttgtagaggtgggttttccctatgttgcccaggctggtcttgacttcgtgggctcaagagatcctcccacttcagcctcccaaagtgctgggattacaggtgtgagccactgcgcccagctgacatctacagattatcatctattattcttgtatttgttaaccatgatctcaaaatgatttaattataaaactcaaaccttaaaggacaattggattccaaaatgtagattatatgtagataatatttctgttcacaagtctaggtgtacattagtatccattcagaaaagtgaaaaaaagtttaaaagcatttttaaaaacatgatgaaactataacactcaaaataatgtgatgggggataaaaggcagttgattgataaatgagtcattgacaggtcaatgctgtaaaaggccgagtctaagttgatggctctcagtcctggttcgtcactgctgttgtggaacttggcaacgagtccctcttgggaattataggcttagcatcatgctcttgctcgtattagctgcttcttctatcactctttcaacagtaacatattaaaaacaaaaacaggaaaaaaaaccctcaaaacttctcaggtaagtagtattaaggacacaaaaatatttcaggcttgatttagaactacatttatgaaagtaaactacgtgatatagagcaaaaccacaacctttaggttttggggggttttggtcttatttctctttttaaaaataagagatagggggtctcattctgtcatccaggttggaatgcaatagcttgatcacagctcattgcagcctggaacccctgaccacaaagggatcctcccacctcagtctcctgaagctagaactacaggcatgtgcctccacacctagctaattaaaaaaaaaaaaaaaaaaaaaaaaaaaaaaaaaaaaaaaagtgtgtagggaaggggtcttgctgtgttgctaatgttgaactcctggccctaagtgatcctcctgccttacctgggattacaggcatgcaccttgtgtctcactaatagatttgctttctaggtctttcctgtcaggtccaccaatattttagatggatggagcacttgattagatcaggagtcaaaattctattcctgaatctattacttaccagttgtactactttgaatgaatggcttaattttttagtgactttgaattgttccagatataaaatgacaggataggtctagagagttgccttagatgaattaggaaacagtttctgagatagagatgttagtgcagtaggtttattggggagtgttctcaggaatgcctgtggggaagtgaaggatgtggaggaggaagatggactggaattcatttgccagagtcctcagcagatcctaccagctctagagctgggatggcccttcagagttatcctgatccacaaggggtcagcccctaggcattcataagtcactttgtccagtcattggggttgaccccaggaaaaggtatggtttggggtaagaggactcttcagttgagggtagttcctaggaagctagtgagctatgagttggcatcaggcaacatttccagcaatttggtcaatgagttccccttaaggctggatctgggccacggaccatggcactcactgccatattcacagcgtcgttttcagtgtgaaattctactgtgttaaagtattgtacagtcactgaaatgagagtatttttatatttggctacccatgacatttattctcttctgattatattgtttctctcctgatctagagttttagattgttttgtttgttttgttttgttttcctgtacttttctgtctgttgaggaaaaagagttttattcttctagtatgagagtttctattagtcctcctttttagacagatgaacaccctgtgacaattccttttgcctttttgtggcgtgtaaaaaaaaagaaatccataaatagagtcgttacgcaagtcttcatgagttaatttctctctccagttttcttactactttttccagttttcattttcttcaacagaaagcttcttcttctggctggacacagcggctcacgcctgtaatcccagcactttggaaggctgagggggatgtaatcccagcactttggaaggctgaactcctgagttcaggagttccagaccagcctgggcaacatggcgaaactcccaactctacaaaaaatacaaaaaaaaaaaaaaaaatagctgggtgtggtgatatgcccctgttgtcctagctaaaggggaggctaagctgggaggattgctagaggctgggatgttgaggctgcagtgagttgtgatcataccactgcactccagcctgggtgacagagggagatcttgtctcttaaaaaaacaaaagtttcttcaaattgcccctttacaatttaatatgcatgaacacatttctttacaaagagaaggttatcttttatctatattcaaaatcatatgccctggggatctttacatcacaatgcaaataaatgttgagttaaccaaaggaagtgtgagtaacaagttagtgactgggttagggggtggttaggacagtggcgtgtgattaagagatgaacatctcagaccgatgcttagtaaaacctacagggggaagcatgatgacctagccttgaatatctcatttaggaagttacacacgtgtctgggcttttcaaaatgtttgcatgccattaatcagcatcttacatcagcttgctcaatgaatgatgactatgtcaaatggaagtaaaacatataaggccagagaaggatgaagggaagttttttttaatgcagtaaaggataaagaaggatggaagtggccaggagtggtggctcatacatgtaaccccaacactttgggaggctgaagtgggaagatcacttgaacccaggagtttgagaccagcctgggcagcatagcaagaccccatctctgttttttaaaaataaaaaaatataaaaaaaagaaggttgtaagttattcaaacccataaggagttcagccaatgtattgaggtttcacactttagatatgatcaatttgctgtctttggccttaaaggaaaaacacaaacacagcagcctcgtgttcttctcagacattggtttctcctcctttcttcctaagacagctcttttcccactttctctctggccaagtccatgctcagcattgcgtgacttcactgttagtctaggtttattctgctctgggaagtttccctgacccccttcttgacagctgcagatcctgtcagtcacttctctgtgtgcttcccttgccttccttgtagatttttattacatcaattaggatacaccattacaatgcattattttgtataataaacacctgtatagtttctaccatatgccgggcactaatctaagtgatttacaaatgattattcttctgaccctcatcacaattctatgagagcagtctattattttcaccaatttatagaaaaggaaactgaagcatagagaattgaatacattttctttgatgtcatagcaagtaagaaaaaaggctaggattctaatccagggagtctggctccacaacaggtgcaattaaccaccagaccgtgaggcctctctgtcatatgcaagctcgtctgttttgctcagaagactgtgttttactcactcactcccaacttcttatggtaaaaattgctttttaatgatttaaataatacatgcccatgtaaaagttaaatcaatgactaaagcattctgaagaaaggaaaggttacctggaatcccatgaccctgaaataaccatcattaaaattttgttctttatccttccatgcattgtttaatgtaccacctacccacacccatacacagtaattaaatgggacaatataaccatttttttaaagaaggatggacatcatctgctctcatcctaccagagttgtctatcccaaaaagacaggttaaaaatctatgtgttttttctataccttttattctctcataggcttgtatctctcatttacgttaatggaactcattggtgtttcaaaaacatgatcatcttaaatgtactcttttagatgttgctttgctcactcagcagtcaccccatgtcacctggcaaagccctaatttatttttttcactggccacgtgacattcattccacagtgtagatgtatcacaatgcattcaggtattctcctatggtattaacttggcttctagaatgcaggggctgtctttaaccctggtgtttgtgacattgtgatgggcataatgggatcccttgaataaatatttgtaaaacatggatggaagtcagattttagaaagaataaattagttttttcttaattatgcatggatatggtcttgaatcggttctcaataaatcaaatttcagtaagggactcacttaaatgtatgagaagagacccctgtaatcaatgtttttaaagttaaatgattgtcttttacattttaactggtgtaaaataactaattattgttccaaatagaatttttgcttaaagatacgtacaatggaacgttataaaaccacctatatttacagataccttgtgctttgtgatctggcttgtatttttcctgttcctttcctgttaccctgtgtacgaaatgtatgttcttcccataaaaaaactaaactacttccagttgtgtaaacacaacagattctttcagaccactatgccttggtgtatgtcaaccctcagctaggaataacatttccatctctgtgattccattggcaatttctgctcaccttttcctaggttgaagtgccacttcttctgcaaaacttttcttgaatctcctttcctgttaccctcctgcacaattaaaaacttgcatccatttgatcccatagaatttatgctgtacttacatgacaggtacttacatcttttattttaactcatttatatcacttacaagactgtttttttctttaggacttggaatatgaccttttcatctttttcactgcagtctttttagtgtccagcatggagaaagtgctcaaaaatatttgttgagtgaatgacagtagagaaaataaaaatgtcctggattggaatcatgaaaactgtctacttatctctaatattaaaaagctcagtgtaatcttagaaaaaataatctgagagctctgacactttccagaggccacttccacgggaaaggaggagcaaagtctctgatcagaagttgagtaaatatcctctgaggtccctgattatccagacattgacaaaagaaaggctctccaaggtttgccattattactataaggaagtcccagctcagatgattcatagttaaatatttgcatctcctctggctaagaaaaataaaagccacgacattccagagcctttaggcatgtaagatcttggtactttcccagttattgctccttagaaaccggtaactgaaaaggccctgtttcagaaaagcaagatatgtcaaatgggaaggaagtagaatagctatctggttggaattcagaaagtatatcaaggccaacaatataattgttgaaattggttattaatgttttgatactgtgacatatctgttttctgttctctaccacaaacaagaaagatgttgaaatatggcaaatgttatgaataacaaagaggaaaatacaaataagttcttttggcaaatctccgtagcaggttgaactcagactcctttaatgtcaataaacaaggctcagagtcaatgccactttctttggtggtcactttaagtgtatttctcttacaacagccctgcacgtccagtgttattattactgcttcacagataagaaagtggaggctcagaaaaataatgatccataattgatatagtggtatatatataatttatatattataccataggatttaaactgaagtggtaaagcaggtggtaatttgcagagaatgattttggaaatgctccgtagatacctctggctctaggcatataaaactattttcttattaactgaaaatttacaattacaacttgattcttgtggtttaagacaatggaggctttctacatggtgcatgcgaattttcccaaaatctttcccaaattcatttataattcagtgtgggtgagcttaccagttcctttccagaaaacaattgtgattaaggagttcacacagacaattattctgttattctcctctgtcctcaggtaggcagtgctcctcgagctttgggtggcaatccttcaccaatccattgtcagtgtgggtccagcttttcctccttaggccacaaagatagagttgctcatattttatttccaaaatatagtgttaggggcctgaaggccacaaagaagactattctgaaagctcccacactgacatcctccccagtactggaaaacaagtaataaaagagtaggaaaaaagacctcagggccttgcacataataggccttccataagtttatttcataaatgagattctgcttgacggactggcagatggagcctgagtttatagtcctgtctgttattaccttgctttgggccctgtcataacacttcctctcaaacacgtttgaaagaaatgcagcccaacataggccgtctcctcgctgtgctgagagggtcttgggtctcacaaagcaacacacacagccaggtcatgtctctgagcatcggatctagaaaactacaaagccaggaagacatggacaatgctaacatcctccctttgtccaccacatacatgcatgaaaacacacctaccctcactctccacccacccacacacacacacactggaaattgtatcatacacacaccggaaattgtacccaaaggacgctattactaactatgaagcaagtggcacccatggcttgtccagagaagacacccacagggtcagacttcacacaacaagcctatgaatgggatagcccacatttaggagtggtcttctaatccagaatcttctctttatttagttcaagataacataaacttcctttttgtaaatttgtccatcatccactcccttgctcttatactctagtgagggggaggtcagatgataaatgacaaggaagatcatttccagccgtgatgagtgagatgcggaaaacagggcagccatggagcagcgagagaacaaccaggtgtggtcaggggattccctagtgaggtcgtttccaaaaccctcatgggtagacctgaggctgtgaggaaaagaggaatccaggcagagagaatcaaaaatgaaaagtcctcatggcaggaatgagcctatttcaaaaaaaattaaaaaacaaaaaaatctgggtggcttaatgaaaaagaacaaagagacccaagaggctagtcagtttcgactggtgcttagaggccatggtagagtggacatttttttgtttgtttgtttttgagacaaagtcttgctctgtcacccaggctgaagtgcagtggcacaatctgggctcactgcaacctccgcctcccaggttccagcgattctcctgctgcagcctcctgagtagttgcaattacaagtgcccgcagctaaacccagctagtttttgtattttcagtagagatggggtttcaccatgttggccaggctggtctcaaactcctgtgctcaggtgatccacccgcctcagcctcccaaagtgctgggattacaggcatgagccactgtgcccggcctagagtggacattttattctacatacaatgggaagccatttgagggatttcagcaaggagattacatgatctcaatggacttcttatttttctttaattttatactttaaaaatttttgaaacaggggctcaccctgtctcccaggttggagtacagtggtataatcatagcccactataatctcaaactcctgtgctcaaagctatcctcctgtctcagcctcccaagtagctgtgactacaggagtacacaccatgcccagctaatgttttaatttttttgtagagatggggtcttgctatgttgcccaagctggtcttgaactcctgagctcaaacagtcctcctgcctcagcttctcaaagtgctgggattacatacatgaatgcacctggcctgaatgtactttttaaagaatactaaggctattgaatgaccaggtggggtagcagagaggaacactgtgagtctgtggcagtgtctggataagggattatgtaagtaccactaagatggctatgttgaagagtgagggagcatttagtttgtctgttttataagtagaggccatcagacttcagaggaattcagacttaaaattcatgtgcctttgaatggggaccacatacatgtcacatcacactaacactaatgtttcattgattcattctatcccttcccaggaatcaaattttgattaagagaaagaccctaagtggctgaaggaacaaaaagagttattgcaaaaaaaaaaaaaaaaaaaaaaaaaaaaagctgatgcagttaggaaagggaagcctgagctattaagaaaaacacattgcttcttacatggtagtgctaaaggccaagcctgcatatccctgcaatctataaagtctgttttctctgacagtgtcagagttggaaagatcaataggtgtcactcacaccattcatcatctcagaaatgagaagatttaggaaaggagattgaaatgacttatgtggggtcacagaactagttattgttgagaccaaatttagagtcttgtctcctggatctcagtattatactttaattatttcttttttaacatgtaacccaatttgctcctaatagacttggaatacacagtgcctgaaatgtaaagatgacttactcttggccttaaggcatcaaatctgccacacgaaattttaagataagcataatacatcattggaattactcctgcttcttgtacctctttcacatgagttaccatgaagtgaactctatcttttatggaggagaggatatggaggagcataggagaaaggtaccatgtgaaagaataaataacgtctttgccttggactaagttgcattgcagttatcaccggaagttgacagctttggataataagcatggatcttttttgtctttgttggagcctgttgcccttcacctttatgtaacatctaaattctttattctggttgacatgggttgctttacaattttaacttggcatgtgtcatacgatcataggtataatattctacagttacaaaatatgtttgataagtatgaggcattcatgctcattgtgaaagccttcaaaatgtctgtacgctaggagaatggtgaaaaacaagcagtcaagtgagtctcagtgggttgttttctcagaccacgtggactctcttctcaaatctggtactggttttacgtgactttggagaatcttcattctcaatgagccccaaacttttcagtaaaataaaaaaaggattgatattttatgaaacatttttataccctaaaatgcagaagcatgttagaaatatatagttgctatcagtcttcaattaaatgtttaccacttggcaaaaatgatactttggtaaatccaaacatgcctaggtatccactctgtatactccggagaatgttcctatttaagcttattattgtcttgagcattaagcatctcacatcagttgttacatctggctttaagtctccaatgagccctggggaactcaatcccatcaaaggaatttcgagaggagttcacagctcctatctaccatagaagggagaaacaggataaggaatagatccctgataaagcacatgaacaaattaaatccattgttaatttgagtgactggcatagagaggtggcccctacaaaattgtcactttttagagtcacggtggttcacagaagaatagaaatcatcttttcctcttaacattatttccatgtactacagttccctctccctaaagtggtctacttgcatttgtcaacactgaaagcaaaaacaaagttgaatatacacccatggtgcatattgttaataaagaagatggaggcaattcagtggtattctaattgtaatgataaaaacttacctatttcatcagttcctctcctttgcccctaaaccccaaatactcactttgtctcttagatatcttgaagtagagttaataactaacgagaataagcatctccatccatgaaatattttaaatatagtagtgtggacctaaaaagatagtgaaattggataggccatgaatagaacaagtcctcatgtcataggcaaacatccagaaagttgtgtgttttgcatttgtgttttgttgtttacatctgttgcataggaatgatcatagttacaacagctgacatttaatgaggacttttcatatgttagacactgtgctaagagctttatttacatgctttatctaatttaatctgtacaaccaatttatgaaatgggcattttccagacaaataaaatgacgtttagtaatttcattttgattgcctgtagtcaccgccaataagtattagagggaatattgcaacccagtcaactttctccagagtttatctttctgtattcctcagctggttgttggaggttgattgaaaaaccctttgtaagccttgaaatgctaaatagtctacataggaaaggcttctactattgtttctacttttttttaatggtttgtaatctcagcagggattgtgttatctaaaaatctgcttgatgaggtctgagatactggcttttagaggtcagacaggaatgactgcaagataacttgactttctccttcccctctgctgctaaggggtaaggtgggagtggttctaggacttctgccatagaactagatatgtgatggataggaaatgaaaaaatgtgccactactgcacaatgtcaagagattaattggcatttaatgaaatatctgtgccatattattttatagtgtgcaacatttaaaacaatacacatgtaaaaaataaaaaataaaacaatatgcatgtatgcatacatacacacacacacttttagctctgtcttgagctgtcatctcctggggcaggcttaatgacaggtgcaattctggcctaattcaacctcttgaaattgaaaagggttagcaccactcagtggctgctaaatcctagagggcaaaacagcctcctgtgtctcatcccttcatgactgtctcatgggagctcgatttctgtctctttccacctgctaaccagattcgattttgatgctgtaccattggtagtaaaatatacttctttctggtaaaaggagacctgagaaagtagaaatggcattatttaaaggaatttatacataccatataagttggctggatggaccagccaacaagctcaacactttgtattcattgtttcttttaatactcatttcaagctcctggattcagtatcattatctccatatcacaaagaatgagggactctgaaaaactcaagaactttcaaggtcactcacagaatacatgcctgagctgggattctaactcaaccccttaagcccgatatcctgtactttttctgctatatcaggggtcagcaaatgatagccaatgggccaaatcttacatgctgcctggttttgtgaatgtttcatggaacacagccatgcccatttttttatgcactgcctgttgctgcttttgctttacaacagtcaagatgagtgcttgaaacagaggccacatggcctgcaaagctacaacattgagtggccctgtatgagaaacacttgctgaacccaataacaatacgtgagagatgtattgttattgacaataacgaaacatgagagatgtagctcaaatcatttaactcagtgtgtctacatctttttcctgtatcttcaaaatccaacaggataggtctatagatatactgtcttaagcccagcttcttgtatacatttattttgttccaagataacgtgcagaaacccgaattccagataggtctcttataatgagtcatgtttaagagggttctattattccactttgcatttctagaacatacttctttcagaataattactttctaaacctgttcacttagcaggcagatggaaatccaacatcctttggcagagaagagagaggaattttccactcgggcaaagtgaagcactggtcagctcgtggctgaaattttttatgtcatcccctggttctacagaagactgtaaggacagaggaatgaggcatttcgccttgggatcttcagactcagatttctgagtcaggtttgaggttcctgctgtcctgtgggcagtgaggcccagggattacaccaaaggagcaggaacccaatgtcacaggtcccctaactcctgcctagttgcccaggccacataggcacaggcaggggagctggctgatctcatttgtttgttttccgtgtccgttctcaggcagtgataggcatgctatcatctcaattcttaaataaaaccaagttgtatcgttgaagagcagataaagcaaagacagaagcattttaaaaggaattttgtggcttccaaagtacaagtatagagtatttctgagttaatgaagaaataattacaaaatatttttgaaaaagtgacattttattcatagtaattcatgtaattccaactgaagtaattgatactttgtaatagtaaggacctattcgagtgaatgtttaagatactaattatatatcaattttaaattatttaatatcaaaaaggcttgaaagcagcatattttgtgtcattatgtgaattcttgctttgccatttttaaaactatttgttttctcataccccctcctctttattttttatgatgtcaaagactgtgtcagtcaagtctgtctctatgtcatttgagtttatgtttatgtgttagtgcatttttacaagttaactatccagaaacatgcacactctgggcagaataaaaaatgtctaagttaagtgaaaaccactttaaagcatggcagccaaaatagctgtagaaaagtttatgctctattatgtacaattttaatagacatgatatcttgtttcccagaatacaacagattgactatcagtcattttgtaaaaaatgaaagcaaaactaacaatcacaagagctaagatttgctggccctttgcactgtcccaggcactagtctaagtcttttgcaagtgtttcatttttacagcaacacaatacatttcctactgttgttatccatcttaaggaggaaactttgtacagaaggtttaagtagctaatcaagttttcacagctgataagggatagagccagagtccacaagcagtctagattcttaatgccaatgctgtattgtctctccagaaaagaccactctcacctttccccttgttcttgataatacagttaaattattcatattcatagcataaattttctgtatcatatttaagaatacagttaaatattggtgcatattagaaagatttcacttaaatatgactacatgaaagtagatttgtcttttctaaaaaataaacaagcatttgttttctaaaaaatttactggcgtgcaccatttcatttcctaataattcagaataaatgaggtgtcaccgtggtccacttcaacagtagatgggcttatattcaggcaggaagcatgtcacctatacaacacagatgtgggtgattaatgaaaactaaatcatggggatgagatctttaagaagaagaaaaccaagttgtcttccagaagtgttttcagaaccccctgttttgaggttgtggatagacatgacggttttacaatgccaaaacagtctgttctaaagagaaaaagttcaatcaaccatttcacctgcattatgccgaagagctagtctttacagtcatggggctttaaaactattttgatagcctgtttgggctgcctctaaatatatcctccaaataaaaacctcagaaaatgtatcagagaaatgtacataattaatatttggcttaatatattgtcaactttgattttacatgtcccatccaacttgttaagccttctttgtggccattagtgtttactagagaataatatcatatttaattttctaattatgtgcgaaccttggagtcaggattagttgatatttttacaccttcaaatttataaacctagtatgaagtcccatctagactaacaaatgttttataatagaaatttaaatagtactccagttttgtttatgcatttgctgatggtctttcttgctatgaactttagaaactttaaatgtccatttactcacaatacacacacagcctcaatgacctaataagcagatttgcagagccataaccttgctggcttatgtcagctcgaagtaaaaggggaggtggtagtggtgaatctgtttttattactcagtgtttaatcataatgaatcagaggcttttatgagaaaccttctacatcccatgaaagatttgctgatcaaagatgtagagatttctgttttattagaaaaaattgtttagcacctcattgtggatacagaagacattgtttgttgaaaagtttaagtctttttacgctacattggatgtcacactgttctgagtttagtggtatcaggtcatcagattctgtaagatgtgattctaaaaattcagtcctagtcctaccgagtccattagagaaggtctgcagtatataaaactgtgacttaaaaaatgctcaatcttccatgcacataactgcctgatgactctcaagctcaggtgtgaccttcatagacaggctgttgtaaagtctagtaattccttcaacacaaggtaacttagtatttaaaccttgaccacacatcacttcagaattactaaaggaacttaaatatatgtcagagctcctcttcggaatataggacaatggagcttatgcagatagcattactttaattttaattgtacccatctgggttcttcgaaatggcaagtatttcgtttatgtgcctttctcatcttgggtcaactcagttccatgcactttaaaattattttaggaaagagccacatcttttttttttccttctttctctttctttctttctttctttctttctttctttctttctttctttctttctttctttctctttctttcttttttgtgcatgcatgcgtgcatgcatgtgtgtgtgtgtgtgtgtgtgtgtgtgtgtgtgtgtgtctcactctgctcgcccaggctggagtgcactggtacaatcttggctcactgcagccccgacttcacaagctcaggtgatcttcccacctcaccttagcctcccaagtagctggaattacaggcacatgtcactacactcagctattttttttttttttttttttttttgtatttttagtagagatgggattttgccacattgcccaggctggtcttgaactcctgggctgaagtgatcctcctgcttcaaaagtgctaggattacaggtgtgagccaccatatttggccaagaaccacatcccagtgctgtagaaaactccaaaaatttattttgcaattcaaaatataaaagtttgttagtagacatttagtttgttagatatttaaatctactagacaatctattatgtattctgctcagaaatggttaagacctactgatctagaagacggatctctctgagccataatttctgctcaaggcttgctaggggagatccttctaacttggctttatacacaagaagctagctcacaaaaatgtcggtattctagtagctatgcgtttcattgaccagacctgagatttggcctctccatcacttcctctgcaggtgatgtagacatcatttctgctgacatctatgttgatgcagttctagagtcatctgtgtccctattatcctgaaaatgaaaattgatagcaaaggcagataatgtccatttagttctgggtgtaaatgtcttccttgctcttccattgtgcaagcactttatgatttgagggagtaatcaggttatattccttctgttggccagaagtgcctgttgaagaaagacttggctctgttgtctggaagctaactatgtagactgatccacagaggactccatattcatcttcttgatactgagggcttcatctgtgagttgtaagcctgtaaatcctctgtttcagtggtttcaaagttccaagagcaggaggaaaatccagactgcctctgctgctgtgcagagcaattagacagtttgagtgcctcaactgttcctatacaggccagtggagtcagagccttaaaaagaccctcttctcccagtgctttctcaagtaagtacagcaacctcaatgtcttatagtatcactacagcacaatacatgagtagttttacatttgaagtaggattaaattaaaagtaatacattcacatggtaaactcaaaagtatatggccaggtgcagtggctcatacctgtaatcccagcacttagcgagactgaggcgggtggatcatttgaggtcaggagttcgagaccagcctgactaacatagtgacaaaccctgtctctactaaaaaccctgcagagacggccaaccccatctctactaaaactacaaaaattagctgggcatggtggcacgtgcctgtaatcccaggtagttgagaggctgaggcaggagaatcacttcagcctgggaggcagaagttgcagtgagccaagatggcaccactgtactccagtctgggtgacagagtgaaatcctgtctcaaaaataataacaataaatgtatatatagatataaattatatattaattctatattttatatataatatatactataatttatatacttataaattatataatatacaaatatatatttatataaattatatacctataaattatatatataattatatataggtgaatatatacagatgaatagttatatatgtagatgaatagatatatagatggataattatatatagatgaaaatatattcacatgttatatgaatatataagtatatatttatatataaattgtagatacataaattatgtgtaaaattcacatgaaaaactctctccacctcattttaccctttattccttctctttaaatctgttgaccaaaacaaatcactgttaacatttgttatttaggggtccagaaatgttttgtgtataaccataagcatgcatatatatacatatcaacagctacatttagatggtccacttactacagccccagaatggaaatttcttcctcaaagcaaacattagaggcatcttttgggaaaaaaaaaaaaatctatatttatctcattctgttcttcatttaattagcataatccctgttggatattttcctcaccaaataaggaacctgtaattaagtgttatattacatgtgcttatttctcttcctggaagtccattttttaaaaatatttttaattgatatagcatagttggtacatatctttggggtacatgtgatattttgatacatgtatacaacatgtaatggtcaaatcaaggtgactgggatatgcatcacctcaagcatttatcttatctttttttttttttgagatggagtcttgctctgttgcccaggctggagtgcagtggcgtgatctcagctcactgcaagctccaccttccaggttcatgccattctcctgcctcagcctcccaagcagctgggactacaggctcctgccaccacgcctggctacttttttatatttttagtagagatggggtttcaccatgttagcccagatggtctcgatctcctgacctcgtgatccgcccgcctcagccttctaaagtgctgggattacgggcatgagccaccgtgcccggccaagcatttatcttttctttgtgtcagcaacattataattcttttcttctagctaattagaaatatgtaataagttattgttaactataatttccccactataatatcaaatactgtaagttattccttatatctaactctatttttgtacccattaaccaactgttatttacccctgctcttctccttcccagcatctgataaccatgatttcacgctctatggagatccttgctttgatgataaattcattaaggacaagaaccctgcagggtgttcaatatgcttcccaggtgccaaatagtctcaatacatattaacagaaagtcagtgtcaactcacctgcacctcacacagtaaattgatttaggcatctcagattcctaaactctctaggttaacacctcatatagtaatgaaagtataatcagttcacatgattgaaatcctctctagtttaatgtacttgttgcttttccatggactttgaaaacatgaaggtctgtagccgtgttgttgcttttccatggacttggaaaacatgaagttgtgtagccgtgtgtctccagacttttaacagcccagaaatggtttcaatgttctgcattaaataaatcgagaagggttagacaaaacagtgtctgaaagatttcatgctgtgagggtgatgagggtgatgggtgacattaatgaatctgaaatggtcgtgactacaaacttgtttttaaaatgtcactttctctaagagaacaaaaacttgaaactcaatgttcatgaatacaagaaggccttttcaaagaaaggccacgggcactctcactaatacacacttggcatttgggtatatccctaagctgtggactgtgtttacatatattactctttcttctcatcactctttaaccaaattgttgagtgtccaagatgccacatggtcaatggattattaccctgtggattcaaatctgttaccaattactctaggggtttattgagtggtcctgcacacccactttcctttgtttttctaattatcgctgcacagctaatcctagctcaaaaaatcaattcctctctcatatctacttacatatcctctttaagccccttctgtgtttttttgttttgttttgttttgtttttgttttatctcacttccatctatttcctggttatttcaggaaaagttcttttcacaccactttttagtggattccatcctgtctctcttcttgtgaccataaaataaaatttgtcataaacaaatgtaagagtctggatgtttctacaaacatttaagtggcaggaagaagctaaagccatatttttcagtcaaaatgttagcagagattttcctgcactgtgcatgatttattttctttctttatatttttagataccttataaattgtctaaaatctcaatgaacaacatttatggtcaaataacataaagaaaaatcctttatagccacttacttactcaattgtatagtgttttgacattctaactacactatcagtatggttttctgttataacgtagtataggtatagattttagccacatagtaggtgaaataggctatgtgttaatctagactaagacacagccattatctataacatatattttatgagaatttgcattccaaggtaaaaacaactgtttgaaaagttaccttttaaacaaatccagttcatatggtgcattactttcattttctgaaggtgattcatatggaagtattgagaagagaaacatcatagtttaaaaaaggccaatcagactttgaggacaagatccaaacattatgcaactttatatcttagcagagtgcacttagtaggtgttcaataactctttgttggataaatgactttatgagtaaatgaagaaaacctcagagctattggcttcctgtgccttgaattacacttttgagtgggactgccttctgcaagccagttgaaaaatagctattggctcacagagttcacctttattttgaggactctgtcaagacaccttagtgcatgttcctagttatgtgaaagatatgctgccaatcagaatcccaatggtctccttgtatgtttcatctttaaatggggctgcgctgttagggacaggatatatcttggcagactacatggatatgaaaatttcaaatcttcccatagtcctctatctttaaggaaaatcatggcacttgtttttgaatttttttaatccatcttccagattccaaaactaggaattccaaatgttgtttggacagactgaaaagagaacaaccaataggagaagtggtacactatgagtagtcaaggtaccatacacatgggaagtgtgaaggagacttacttagtatttacttatgtctctttgccaatatttgggagtttcacagagcatttctagataatgagggatggaagtgaagagtaggacaaggtattcaaagatctaagaagaatgagaaatcctcgatttcccatatgacaggatgacttggttacacgagtaaattgctttttgtatgtgaaacaggcagcaattggaggtagcaaaggaatacacaggtaagccctggagtccaattcccaaaattagtggtgttttctgattccctaactgactctatggtaggctcctggtcaaaagatccatcagggctgctgggcccatgctgacattccatatagccatcttctttctgattctctgtcttccagtgatgatccagctctttgcagcagcaggattgtggctggccagaagcacacttgatttcaaaatggatgtgacgggcaggtcacctccttttctgcagaagtgtacttgcatcaacaaatctttttcctctcaggttttgaggaaatgggatcaaacattccaacacagagaaataggaggcgtgggcagcagctctcctggatctctctctttccttgaggagatcaacttgtaaaagattacaaaatgtaccctaagtggtcctagagcaccctcctatcttctttcccaagcttgtcatgtggttgcagtggacatggaaagtaaacactgctataaacagagaataataaattgtaagaaagcaccagaatatccttcttgcttgaactttgaatcattagatccaaacattccccctctctcttctcaaagttccaaagtgttaaagagttttgttctccggtatcaggagttggccacaaatgctttctctataagttcataattcctgttgggaaacttggaaaagagctctccccttctcatccaaagaagtgatgacttctctttgttagtttacaactaacaaagtcccatttctggtttgaaagtcagatggaccttggcttatatttatttaacaaagacgtggaatttctctaacagactgaaagtttattagaataacatctagcattaggcctggcaaataggaggtcctcgttaagagatctgatcagatttgacttctaatcccagatataaggtgtttattctttttgagccactatttcctcatctataaaataagaaatattcataactattccataatatgtattcttatatcctgtataataaaataactaatataggaatataataaataactaggaattataaataatataagattgtaataaatatccaaaatcaagggcctccttgaatttgttatatattgatttgttgattttttgagggcagtaatcaccacgtctgtccagatcagcgcggtgtccacgccccactcagcactgtgccttgtccatagcagatgctcagtcaatatttatctaatcagtgctgtttgtattcaaagagaatgtttaacttcttactctttccattcccacctcccctttttgatctcatgtccactatcggtgtactgaggtctcctgggctctgtttgcaggaatctaaaagtagtttttttactttggtactgggacatgtaactccactttttagagaaaatatttcatgctaattaaaacatctcagggctggtctccctgcacttctcactttcacacctacatactcataccccttttctctttttccttactttgtaatgctattagagttgacagaatacttgctgcttccccagaaagtcttagccaggagttcatgaaaccctgtcaggccttgtgaaatgtacagatgtgtttcaaatgatccataaaccctgatattgtataaaatgtgtgtgccattttatggaaagaggatgatatgttttcttaaccaaaatctttcggggtacttcggtccataaaaggctaagatccactccactaatgagcaagatctagtcatttagaaaatcctgcactctctcctttgttactgcctcaatttccttaaaaagctcttataagataataaagaagccctctttacttcctacagttccactccacagcaataccagcttaagtgtgtgccttccagcgtccatcccatctctccgtctgaggggtccccactcctagtccacccaggccaggaaacccataactcatatgtaccagaaaacctcctttttaaatttcctcatgcttcctggcaccctgacctgacaatggactagtacctcatatccacttctaccatgacttctgagaaagtggtattttttaccacagtgaacttggtatatgcagtgtgtgtcaggggcactggccttactaaagtagaggcccattctggagaatagtaagaaataaggagcaatacattgatgaaatagaagggacattaagtgatggtcacagaccactcttaggactgccattaacttcagatgttaaagaagtgcttcagctctctgtgctttgtcttcttcttgacaagtgaggatgttaggattatctgccatgtcatccagcttcaatctctataattgtataaatctggttggcagtggactcgttagtgcaaagtcctaaagccttaaagatccgaagttttctcactgggcaagcaatttgcgggattacgacagtgaacttggtgtatgcagtgtgtgtcagggacactggccttactgaagtagaggcccattttggagaatagtaagtagtaaagagaaatacactgatgagacagaagggacattaactgatggtcacagaccactcttaggactgccattaacttcagatgttaaagaagtgcttcagctctttgcactttgtcttcttcttgaccagtgagaatgttagacgggattatctaccatgtcttccagcttcaatctctataattgtataaatctggttggcaatggactctttagtgcaaagtcctaaagccttcaagacccaaacttttctcactgggcaagcaatttgcgggaaattaaacaagtccaaaatattgaacaaatgaagaaaggggccattttaacagacaggaatacttcatactgtaaagatggccaggtgtagtggttcacacctgtactcccagcactttgggaagttgaggcaggaggattgcttgaggctaggagtttgagaccagcctgagcaatacagggagacctcatctttgctagaactttaacaattagctgggcatggtggcatgcacctgtagtcccagctatgccagaagagaagggaggattgcttgagcacaggagtttgcaactgcagtgagctatgatcttgcaactgtgctccatcttgggtgacagaatgggaccttgtctcaattttttaaaatatatatatacatatatatatatatagagagagagagagactatatatatgtgtgtgtgtatatatatatatacagagagagagagacagagagagagtaaagatctcatttcctccacaaatgttaaaaacattattctgattttaaaaaaagaatgaatttttaaaatttacaaatttctgaaatggacaaaaatatcctaggccttcttcctcaaaaaataataaataagaataataagaaattgcactggtatctgaaaaagcaacttaaagctataaaaattaaaatagcatgttatgccatgaaagagacaaatgagatagattcaagtttcaaaataacaattgttattattatgatacaattatattaattttgtacctataatttaaataaaataataataaataagaaaaatcactgaataaaggtaataatttaaataatttaaaatcttaaaataatgattatatgtataataaaactgtaaatttacaattatagagctataaacaattttatagttgtaatattttgtaactaatgaaacattatattttaatgattttattattgttgtaattaatataaagaagataaagaaaaatgggcaaggtttgaataagcacactttgtcgaagatatatggatagccaaaaagcatataaaatatgaccaaaagcctctggtgtttagagaaatgcaaattaaagctaaaatgagattcttctaaatacctatcagaatgtctgagattaaaatgactgactgtagcaactagtggcaggaatgtggaggaactgaagttctcatacactgctggcagaaatgtacgatgacacaacccttttgaaaaacattttggcagcttcttaacaatttaaatgtacatatcccatgtaagccagccagtccactcctgggtatttactcaagagaaatgaaagcctatgtccatacaaagacttgtatgtaaatatttataacagctttatctgtaacagctaaaagttggaaaccacccaaatgtctatcagcaggtgagcggataaacaaattgcggcatatacagtgtagatagtggaatactactcagtaataaaaaggaatgaacaattgacacatgctacaacatggatgatgcaaaataattacactaagtgatagatgctagacgaaaaagagtacatactggctaggtgtagtggctcatgcctgtaatcccagtactttgggaggctgaggtgggcagatcacctgaggtcaggagttcgagaccccccaggcccacatggcaaaaccccgtctctactaaaaatacaaaaattagccaggcgtggtgatgagtgcctgtaatcccagctactagggaggctgaggcaggagaatcgctagaacccgggaggcagaggttgcagtgagccgagatcgtgccactgcactccagtctgggagacagagtgagactccatctcaaaaaacaacaacaacaaaaagtgtacatactgcatgatacaaaattctaagaaaagaaaactaatctatataaaaatttttctctgttattctctactgagaggggatgaggaggattaccaaggggcaaggaggaccttttggaggtgatagatgtgtttattactgggattgtgttgatggcttaccaggtatctatgtaagtcacaactcatcatatggtatactgtaaatatgtgcaggctgggcgtggtggctcatgcctgtaataccagcactctggaaggccgaggtgggagaattaaggccaggagtttgagacatagcaagatcttgtctctagtaaataaataaataaataaataaataaataaataaataaatgcacttttttgtatattgagttatatctcaatgaagctgctttttttaaaaaaaaaaaaaacatataacataaaagagattaacagaagagattcaaaagtctagaacaccaaatattaaaggtagcttttcaaatcagtgagaaaataatgatattacagaaaatggcaaatcatctagaattaaatttctacttcatactatcagcaatataaattgcagactaatctaaattaacaatttaaaagataaaagaaactatagaaaaatacacaattatgtatctgttcttgaatggaaaaagattttccaagcgtaaatacaaagaaaaatttatatagtaaaacaatgattgatttaatttgataatttttttagaaagtttacatcaaaacaaattacaaaattgaaaggcaaatagcagtctggttgtggtggctcacttgtgtaatcctagcactttgggtggccgagatgggcagattgcctgagctcaggagttcaaaaccagcctgggcaacgtgatgaaaccccatctctactaaaatacaaaaaattagccgggcgtggtggtgtgcacctgtagtcccaactactcgggaggctgaggtgggagactcccttgaacctgggaggtggaggttgcaccgatctgagattgcatcagtgcactccagcctgggtgacagagcaagactcccgtctcaaaaaaacaaaatggcaaatagcaaaggggataatatttgccacaaatataaaagaaaaggatatatccttgctatataaaaaggtcctatgaaacagggacttagttggatatttctatttttaaaaaggcaaatcatataaacaagtgttttacccacccatcccccctcaaataaagaaaaaagacagggatggagaaagaagggggaaaaaaaaaactgagtaaaaaaattctttgcaaaagagtaaaaaagagatttgtttcctcaccttgatgttgtctttataagttgttttattttaatcttttgtttttccatattttcagagttcctacaatggacttgtagtacggtacctgggtgatcacaaacataatctagggagtagaaaagaagttcaatgactcagcatagtgttaatggtcttccagatgaaggaggggacatgaacatgtgtctgtcccaataaaggttgagacaaggtttgttgtgcacgtgcgcgtgtgtgtgtgcgtgtgtataacagtgaggagactgtaattagcaggaaaaattggggttttgaaagtagaccacagtcttgtcattgtaccatgactcaccaggaggacagaggacaagtaccctactcctgtgtaaatccagactgccaagtagagcactgagatttgatgagtacttaagaaatgcttgcttgattaattggtaaaagatattaaaggggaagattttatatcacattcaaacatatgaagagaaatgttaaaaatgtttaaagttccatttccagtctcactttccaattcttggttcaaaatacaaggggtaattagacatcgactgtgtagtcaacattatgatcaggctatataaaatcatgaaacatcatcctaaactttaaagaactttgagtttagctgggaaaatatgctcacaggaaataattatgtaggaaaagaaggcatcaaaagggcttaaagcaaccaatcacacagagtttccttgttgggaccccccccccacccgccgggccccaccccgttgatatcctaaatgttctcttgacatcttggatttaccatagagcctagtactgtctgtaaggtcctgggcctgttctaattagtgctgagtatctgttgatctgctacgtgcaaatgggaagataaaactaaatgttagattagggtcaatctttaaaactctttcctagattgtgatggtattcagtggtggttgaccatcatggaattgggagatatttgtgaatgtggctgcaggctgcatgtcctttgtgtctctgactcaagacacacccattgatctcatttgtcttcatttcatcattgggcagaatgcgttctaaaatgaagagactaaaaccttcacagaagcacactctttcaacatctaaggaaaaattgttgatgagaaaactgtgagaacattaggaggtctttaaattgcaaggggaaaggtctgttggtgaaaacagctgaaatcctatggattaaatcaacttgtaaataatgtattcttagagtctgcagtgatctcataggcatgtttaaatgctgtttcttatgactacagtttaaagtcatggtatggactttcagtttcatgaggctggcctgggggaaaagagcatgaggttgaggttgatggtgttaactagagcaactgagcccccatacagaccttctgaacttgctcattaacgaagccacaggatggaaattgtatagtgtccttgaccagagcattagttacaagttgtgagaagagaagaaataagtaagaaagaaaataaatgacttataaaaatcctcagaagatatagtccccaactgttagcacaaagaaaggatgtaaaatcatggaggacagcagtggagaagataacgttagcagacaataaaaggccaaagttttagaacagtagtaagtgtttaagaatatacataatatatcttcctccatttgctttttgtcttcaccataaatagacatgagttaacgtatgtttaaagatttatttcccttttattgagctcacccaacaaaagtttttttcatcatgtcctgcttttacaaaccaagatctaatttgacatgattacgtaattgtgtggccatttgtgcccttccttctcctcctcctttctctaaagtagaaagcctctctttcctagagcctatgtaaaatgtgttaattcgcttaatagcaataataattttcttatgacaatttatctattcactaaagtgttattaaggacctattagttggaagcctctgtgccagctgttgggaatagaaaaatttataagacactgtctttggagctttcaatctagtgggggattcaaacaattaaagagatacttttaaaagacagtgtaataagtactctggaagatgtggcagactgccagttgccttccccagcataacattttcccaatattcattaggaaaagaaccctttaattgtacccaattaaaataccgaatctcccagcctcttctgcagcagatgtggctgtgtgactaagttctgtccaataagatataagtatacatgtttggtgagatttccaggaaggatgctcaagtggagatgactaagtcagaagaaagttccttttagctttcctgcattcctagaattctgatgcaaaagctggagctacagcagcaatcctggactatgaggtaaccttgggagtactagggaattgggatgctagtaactttctagaagcaccaactcagccccagaatgcctcctgctgacttcttttacgtgggagagtaagcatttgtgcatttaagccactatagttggatatttgaccattgcagacaaaaataagatcaaccgatagaatgccatttatgaaaaaaaaaaaaaaaaaaaaaaaccatgggagtggttctcctctctgttatgatagggagaggtcagagatgctgtccctgaagaagtgacattcacactgagacttaagggagaaatgagtgagcaaggtataggaaagtatttaaggaatatcatctgaagctctgaattagaagctatctacaagatactaaaagaagatcagcatgacagaagtacaggaattaagaagaacatagtaggtgacaaggctgaaaaatctcatagattctccattttgcagagacttatagatcatcttcaagatagtaatagctgcagagcagaaggctagagcagagaaagaactttgagagataccaatatagacatggtttctaaagtcttaggagacaataagattacccaggaagagtatttaaagtcaggagagggccaaagacagaaccttgagatccaacacttaaagatcaagaagaagagagtttcctatcttctgtttcttaaaaaataaataaataaataaagcatatcagcataattcagagtcacaaattctaagaaatcatggggcagagggcaggggtgaggtagggtttgttttgttttgttttgttttgtttgtagataaccaaaggaagaaacgattgatgcaagatttcagggagggtgaatagccctccttgtagctttgccctgctagagagatggtgggtggacaattactataatatttacaaacaggataagtctacgtcagcccctaacattctcagtttcgttatttgtaaaatggcgtaatgatacttatcttttagagttgtttgaagagtacataagagacggaaaaggatttttaattagataaggaaagcataatcacctatctttgattcattcacccttttaaactgattaaagcttagaaaataatcacatatgcagattgatcttagtttgtccacctcttgacaatcagttagtagtatatatgtatttttttatttttaagaatttttatatccccatgcattgactaatcttgccccatcatagataagactagaacaaaatattgctttgagaagtccttgagttccaaagatttaccatgaagctaatgaaacctgcattgcagagtccttcactagtatggccttttccaatgtcttgaaaggagtcctagtcacatgttcacatgcttacacatttatgtaaaatatgcaggataagataattaaactacaattatctaagatggcagtctttttttcactctgattttctgtccaaaatattcctcttgtggaagtaggtttggaatggccctgaacattttcggaatctgaactgagagaaagttgagtgaaagatacattgatttaaggcatagtgagatgtctagtaaagttattgtaaggtattccagtgttgaaaaggcttccagaaatatgccaaaaccgactgtgctgactcacatgatgtcatgccagaaagatgaagggccagagattgtatgatgacctgagtttgtccttgtgcaacaagcaccaatggcatatgagtgttgatgggacaagttttgaaatgtatggagccaaaagctagcctgtggaaagttctaccaggcattcgacatgtggtaaggtaaccaggagactaagttccgtggatgtctagtcaaatggaaattttcttctctcaagaataaacatgataatttcgtgtatgcaattctaaattcaccaaattgtgttttctttttcaatggcaatttcaggaaattaaatgatcagaatccccatgtttccaggggccaaacctgtaatagtcccacagacagtgagtgtgtctataacaactaatataggcagaaaaattcaaagacgttttctgaaatttgccaatacctgtaaacatttttaggacattgtcaaaataagctgtgaagctgaaagaagtttatttaagtattaataataaaaatttaataagctatgctaaataccaattctctttctattatctctatagaaaagattttacaaaatcattctcagatgtagaagcaatttttaaaaattcagccaaaaaatagtagggtgaaaagtattataatgatagcaggtagttaattaatagcatgttctttttctgaattttatgatgcttgtggctttgacaactttaaacattttataattgtggaatttcttttgtcgttttacagaaatattcagttttgtacctcataatttgtatttataattttgtattcttcttcataaaaagggccattgaattgtgtttaactcatgcctcaccaaacctgaaccagcattttcctctgttgaatttctattgcctgcctacagcaaggcccacgtcttcctgtaacagttgcccccagttcccttaactatcaccagggagtcagcagttaatgacatgctcaaccttcctccaattacagatggttaggagagaaaacaaagccataaggccattaaactcatgaggttttgactggtggttcggaggtagagctggccctggctatatctgccgtgtacacaagaaccaaaaataccacacttcatttcagaagatccagatttgatcccacctctgccactggtgtatgatcttcagaaatgaacttggctgtccgaacttcaatccccttattcatacgatagacctattgtgatggccggcaagctgaggtatagaaacacatattatatagtaaggggttcttcaaatgtaatatctgttctcaattcctcttctctatcattaccaaggagccaatgatgcacagctacccatgtaccttcattgtagagacacaccctgaacaagcagacaacatggcgccacatcagagtattatattagaatgtgtgtttggcatttctttagcagaggggccaagtgtaggaagggagcgggtagaaaaggaggaccacaggtgacaagagtctcccctgaccttaagcttgcagttcccactgaaccaaacagaagccctgtatgcatctggaagtccttgcttagtgggctgtgcaatgtgtgttttaggggtctcaagccttcatcccatgtagccatggacaacatgttccaggaaaacattacttcctcacttcattacattccaagtgacatttctgcatcccttcttgacgaatgttgtccaaaattggttgtccctctctttgatccagctctgaccacagagatcagttttacatacttgggtacttccccttggtgattcaagaggaggcactttccttaaatagccttggaaaccttgagacagctgctgcatccatctatgttcattgctcaaacttcctgtatggtttgccaccaggcttaggttcaaatccaaaatcaaaatcttaacatggccacccaggcgcatgtggcctcagtaatacacagtttttgagcttcatctcaagcttctcttccccttactttgctctccatgcctgcttccagctcttctgcttcacccagtccttccccatccctcatgtcacacaggttagcttctgtgcccaagtagggtcctgcttcctttcacaaagctgactcccatgagctctccagagatgatctcaagtgtcacttttgtggggataactaccccagtgacaccctcctccagatttggttagcttctcccattccagcctagtttagatggaatcatattaagttgctggcattaatttattatgacctacaaaaccatcaatagtgtacagttctcacaactcccttgtacattgcagccctcatcaaaattgttatgaagtaattgatttgaataatgattaatatctgactccctgatggtttataatctttgtggaagtagacaacatatctatcttgtctactgctatttagcacatactaaataccacctagtaaatatttgtttaatgttacttatttaactgcagagatatactttttacattttctacatttaagatgcacacggaatatgcgatgttgtggagaaaagagctatttgccaaatggttacttgttactttatttttctaaggctttgggcataaaatgccattatggaattactattttattacaatggtatctgtagtactttggccctaatgttcttttttggttatgatgctgcactatgcctgtggaatacattctggatgcatgatgagactactgagacaatcacaatcttgtaagtttccttttcttctaagataaatctcaagcagagattctcttctcaggaagagtagaacttttcacaatctcgagccaagtaaacactctcaaattgcaatgcaaaagattttgcaaaatacttgaaaaaatgcaatttataaagcagaagttgtacagatgccatggaagatctaatgaaaaatcagaaaagattgcagcacagatttaactcttctcaagacagcaaaagcaccccacatgtgacagatactcatgagaacattgggagcctgaagccccgttttccagacaaggaaggaattacgggtctctgatcacagcagaggggccctcattagacccatcaaggattgcacgtgccctgtgcaaggccacatgcgcatggggtgtgcaattaactctgcccatgctgctgaagtttcagtccattagtctgagtgaatcttggtcatttgtatccctcttggtgcctcataaacatatgcctcatagtctgcatcttcaaactttttccatactgtaaaactgtcttcgcaaaatctcatcacaagctgaaaagtgatccctggtgataaacaactgagatggttattcacctccatgactagcctttcagggcctcactttctatatccatcaaatgggaagaacaatagatgcctcatcctcctcactatgttgctgtgagcatctgttgaagtagtggctattcgagtgcattgaaatgcatcagtcagtacacagatacaagggcttctgataactcatacctgaagaatttttgtcaaccctgaagggatttgcttcttggtatacgggtattaaaatactagtataatttctctaacgggagtatgatgtcactagttccagagtcttttcatagatggatgggttttatgataaataactcaccctcagtgttaacttggctttccaactagccaaacaggcctttgtggaacaaggttagcaaatagcatttgggcaaacgatcaaaagggtctccctctcttctatcactctctttatctctcttggtacctctctctgactttctctccctcctttaaaaagttatctctgttttttttaattttttttacattaaaaacaacaaatgggcccttcagaatagtcgaaaactttagaatgcaaagatatcaaaaaataagaaataacctagatcagaaaacagataaatgattgccaggggttgggattgggaggagttatttacaaggtgaatgaagaaattatgaggggttgtggaacttttctatattttgatcttgaaaattatataactatatacttgtgttaatcttgtagaagtgaacactaaaaagggtgaattttattataaacaattttttaagagaacaaaaaatgtactataatcccaccagccaataacacactattaacactttggcgtacttctgactagtcttttttttttttttttttttttttgctggtgtttcaaaatgtcattatgatcatataatacacaaatatacatatatgtgtgcatatagatatctacagatgactaagatagatgattgatagatgatagatcagtgaatagataaccaaactcaaaacaaaatagttaattcatgcaacttgcacaaaaggtacaagaaatatactatgaaaagtctccctctcccctttttccttgggcacctagctagttttgttttagtttttacctagctctcctgagacagtgtgcatatataagacaaaatatacatatacctcttttgtaatactaagacaccaaattcatacttctgcatcctgccttttttctttacttaacaatacatcttgaagatggttcaaattacacatatatagataatttttcatgactgatttttaatagctgcatagtatttctatattttaatgcactgtaatttatgatattgtattgacaaccacccgggttgtttttaatatttcatttttacaaataataatgtgataaacatccttgtacttgtgagatttcttttcctatatgggttatttatctttagtagagcttcttagaattggaattgtgaagtctaagtccacattttaagttttgctagataaagctacattgccccctttaaagttgtgccaatttttactccaactactgatatatcaaagtgtctgttcttgtatcattatcaaaattttaatatttaattatctgatgagtgaaaaatgacatctgatagtcctgtcagttagtattgcttttaatgtgactaatttttagcttttattcatgtttaaatgaataaaatgtactccctttactactttttttttttttttttttgagacagggtctcaccctgttgcccaggctagagtgcagtggcgtgatcatggcccactgctgccttgacctccagggctcaagcaatctgcccacatctgcctcctgcctgtgttgctcagactggtcttgaactcctgagctcatgcagtctacctgccttagcttcgtaaagtgctggaattacaggcgagagccaacttgcccagccctgtatttcctttactttgaactgcatttgtgtatccttggttcatgttctatttgatagccatttcttcttaattagagggatttcttttttttagattagaaaaactagcccttttggctatgataagtggtttatatttccttttgtgtgctacttgccttttgtctttatttggcttttttttggacttgcattatttatttaagatttacgtagttggatttctttctcctttcacatatggcctctctcacttcaatattatgtagaaaaaaacctctgaaataatgaattcctatacttttatgggttctttttttattttgatatttgacccatctggaatttattttggtataagaatgaggtagattttcaacaatttattccactaaatcataaattagtacaccttttttccataaatggctaaatagtaaatattttagacttcatggatgatacagtcttggggcagctactcaactctggccttgggcgaaaaagcagccacagacagcacaaaaaccaatgggcataactgtgatccggtaaagctggtgtagacacacaggcagcaggaggatttgaccctcagattgtagtttgctcacccttggtgcagaagattacttaattattctaacaaaattgatttagtaaataattttccccattgatatgtcttggttcctttataatacacaacattattttttataggtaggtcttgtacaaaactctccatttgattttattgttctgtctttctattcataggctgggtatgacactaatttggttactatagctttatgtatatttttaacattggatgaggtcagttgctcctcaaaactcttatttttcagaattttgtgcaggaatatctgagtatttctaattagattagaatgtcagaatacattcatggacatatgagtttggggttttttaaaattttttttagatatccttcaccttgaacatttattatttctttgtgttgggaacaatccaaatctctcctagatgttttgaaatatacaatgtattgttaactgtagtcaccctactgtgctattgaatactagagcttgttccttctgtctaactgtatgattatactcattaaccaacttctcttcatctgccccccacctccacccatctcagcctctagtaactaccattttactctctacctccatgacattaacttttttagctcccatatatgagtgagaacatgcaatattttgtctttctgtgcctggcttatttcacttaacataatgacatccagttccattcatgttgatgcatataacagatttcattctttttatggctgaatagtaatccattgtatgtatatacacatataacgtctgtatatataatgtgtatataaaatgtatatccataatatatgtatatatacacatatatgtaatatatattgtgtgtgtgtgtgtgtgtgtgtgtatatatatatatatatatatatatatatatatatatctcacttttttttttgagacagagtcttgctgtgttgcccaggctggagtgcagtggtgcaatctcagctaactgcaacctccacctctcggttcaagggattctcatgcctcagtctcccaaaaagctgggactacagtcatgtgccaccatatccggctaatttttgcattttttagtagagacagggttttgccatgttggtcaggctggtcttgaactcctgacctcaggtgatctgcctgccttggcctcccaaagtgctgggattacaggtgtgagccaccgcatctggcctcacattttctttatccattcatccattgatggacatttaggttgcttccatatcttggctgttgtgaatagtgctgcagtaaacatgggagtacaggtatcattttgatatactgaattcctttcctttgggtaaatatgtcatggtgggtttgctacatgatatgatagttctacttttagttttttgagaaacctccgaactattttctacagtggttgtactaatttacattaccaccagcaatgtataagagttcctttttcctttttccacatcctcactgacatttattactttctgtctttttgataatatccatccttactgagggaaagagggtatctcactgtggtttcaatttgcatttccctgatgattcgtggtgttgaacttttttttttttcagatacctgctagccaattgtatgtattcttttaagacatatctgttcattcctttgccctctttttagtgcttttacatatttggcttttgtttttttgttttcgttttcattttgctgttatgttgttcctggatatacaaggaactcaaactatagtcctttgtcagatgaatagtttgtaaagattttctcccattcctcagattgtctcttcactatgttgattgtttcctttgatgtgctgttagtttttagtttaatatggtcccatttgtctagttttgttttttgttgcttttgaggtcttagccacaagatcttcgcccagaccaacatcctgaagtgttttccctcttttcttctgtagctttatagtttcaggtcctaaatttaagtcttcaatccattttggtttaatttttgtaggtggtgagagattggggtctagcttcattcttctacatatggatgtccagttttctcagcaccatttattgaagagaccatcctttcctcaatgtatgttttcagtgcctttgtcaaaaatcaatcagctgtaaatacatgcatttatttctaggttctctattctgttccattggtctatacgtctgtttaaacaccaataccatgctgttttagttagtatagctttgtagtatattttgaagacaggtactgttatgcctccagttttgttttttgctcagtattactatgagctatttttaaaaaatacttccaaagaaaaaagtgcaaaagtttatattagcttactatagttttaataggttaaaattagtagcttctgagtaatgaagagagactgagcttaatttctcctgctttgaaagtacttctagggtctgggtgtggtggctcatgcctgtaatcccattgttttggaaggtcaagacaggaagattgcttgagccccagagttcaagaccagcctgggcaagatagcaagaccctgtctctaaatttttttttttaattaggcaagaatagtggtgtgtacctgtagtcccagctacttgggaagcttgagcccatgagtttgaggcaggagcacgctatgatcatgccattgcactctaatttaagcaacagagtaagtcctcatctttaaaaacaaacaaacaaaacaaagcaaaacaaaagaaagtacttctatttatttcttcacctgctaatttagcttgttcaagtgtagaagctggaggatgtttccctgcaatgacagagtagccaattttgtatctcctgattttttccttctctcattcttctttgctcaacagacactaaattgaggtttgtgtccttgtaaatagtagatttcatttaccctctgccacctttgtcaaaaaataattttaatttaaaaaatgatgtaaacttattttagcaaaattgaagactatagaaagctatgaaagtgaaaatttaaatcaccgtaacactgcactcagagataaccactgttaggacttttatttctttctttctcttctctatacacctgtaacatgcatgtacacctactgcatgcatatgtgtatgatacatgtgcaaacagtgcatgctaacattttctaccctgcttttccatgtgttatttttatcctgtgttccactattttggaaaccgtcagggttgacagagggaaattgatcaagccctttgtcttcattgatgtcaagagtttcagtcaacttggaggccgtggcctcctccttacaggcttcttcagcctttggtttgagtttgggttttttacttttcatttttggaggagccacgttctctctcctttcctattactggagagccgcttcctctcttcactcattcattgtgcagtgtgggggagtcaggacccagatgggaaagaaagcatcttgccacactcaaatctcatcttttttgccatgtttgccccatggcatttctctcagcatcttcttgtgctttttccaaaacatataaaggacaattctactctggaaagtcactgggatactgttctctgagaacaggtattgagaagaagatggtttcctcttggaacttggccaactggctcacagcgaacgtggtgtggactcttaccagctctctctagtatgctaagggcccccaaccagggaccctgaaggcatctcaagagagcagtgtccaggtctgcccttgttggaaggaggatgatgtgaggagatcacctttattaaagctgcaggttgtctgccagattttcaaatttcaatgtaactttttatttaaccaatgctgattaatagtagtggcattgttgaaatccattccccttcatttcattttctaatgaaatttcggatttctacacagacatggttttctggcataaaaagcttgcatttgcaacctgtcatattgggactgtgcagaacttttccatgttttaaaactcaggagaaagaagtaaagatggtaagagtgcacttgagcagaaacaaagggctgtgatcccaaaacaggggacaaatgagctgcaaaggagagacaccaagagcggagagcaagaggcaaagtgatatgaaagactccaaagtgctggttcagagaaaagaaaaaaaagggacataggtcaggaaaggggagaaggactgacatgaactggcaaatggcaacagatataaaaagccagctttctctggggagtggaaatgtttctaagcatttttgttcatgttagtatgatttgttttttcctaagtaagcttgaaaatcatagagtgaataggagaaaccaaagattagggaaaatatttttagaacaagctcagggaagtcatataggtttaaaatatatagtctatgcaaataatggcacacatttcagaatggaaacaaaaataagtggcagataatgtgtccaagtaatattggtagcaaatggactgttacgagagcaaatgatattttgcagagctgagagtgtgacctgtcttcaattatttgaatccctatcctacaaaagcattgaaaaaggaagatctggagccaatgactgtgtattacatatattttcattcagtacaagcagacatcatcagtgtgctatatactactttcattattattattatcttaattaaagctgtcttacgagccaggcgcagtggctcacgcctctaatcccaacactttgggagaccgaagcaggtggatcacttgaggtcaggagtttgagaccagcctggccaacatggtgaaaccctgtcgctactgaaaatacaaaaattagccaggcatggtggcaggtgcctgtaatcccagctacttgggaggctgagacaggagaattgcttgagactgggaagtggatgttgcagtgagccaagatctcactgctgcactccagccaggatgacagagtgagactctgtctcaaaaaaaaaaaaaaaaaaaaaaaaaagacaacaacaacgacaaaactgtctcatgatgaaatgggatgctttcactagccgtggttgctcatgcctgcaatcctagcactttaggaggctgaggcaggtgaatcacctgaggttaggagttcaaggccagcctggccaacatggtgaaaccctgtctctactgaaaatacaaaatttagccgggtgtgctggtgcatgcctgtaatcccagctactcaggaggctgagacaggagaattgcttgaacccgggaggcagaatttgcagcgagccgagattgtgccactgcactccagcctggacaacagagcagaacactgtctcaaaacaaaacagaacaaaaaaagaaaagggatgctttgtggaacagggagattacttgcactggaattgttcaagccaagttctatcaacatttgacacagaaacacatgaccatcgtaaggtctttcccagctcagcattctgtgactgcgtggtctttgtactgagttttacatgatatggatttcttaccttagaaggatcagtttttaaaagatgggctgaatgaatcaaatcagagaacactatttgcctacccaatatctagtctccacagctagctggggacactttatagccacgttaaaaaaacaacagcaaaaccccactgcatttctcaacttctgtagcagatggaggtggtcaagtgactaagttttagccaaagagatattagtgagaattgggagaaactttgagattccttaagaagggagacagaggatgctaacatggaacttgtcctttgccttcccattctcctttctgccatctggatcaggatatctggccatgctgaaatcatgagacaacatgaaggataaaatcctcaaactaagaatagaaatcagaacattaggacctggtctgagttcattgtggagcttccccagcccgctcaggctgcccccagtcttcccatttttagaaaaattaaaactatggtttgttaaagcttctattctgatggtctctgttacttgtagctgaacgcaatgaattgtgagatacgatttaccacaatttttttctttctttctttcttttttcttcttcttcattttttttttttttttaaaagggttgtgccatgtcacccaggctggagtgcaattgtgcgatcatgactgactgtggtgtcaacctcccaggctcaagcaatcctcccacctcagtctcctaagtagctgtgactataggcatgtgccaccatgccaggctaatttttgtattttttgtagagatggggtcttgctgtgttgcacaggctggtctcaaactcctggcctcaaacaaatcctctctcctcagcctcccaaagtgctgggattacgggtgtgacccagtgtgcccagcgctgtttactgaaatttttttttttatgattctgactatagctttaaacccaggctctgccatctccatgctgtttaacaagttctctgcccttcgtctgcctcaccagatgtattatgtataaaaaaaagtcacaacctagattgcagaatttcatgtaaatcgcttacaaaacaacacagatagaaggcagcaattggtgagtttgatctttggtgcccaaatacagctgtgctatttggtgtatacaaatgtcaccaaattcctgcacaaatttgcgggcgggataggggaagaaggaagggatgatgaaggcaatggacacaacagtctaaaaagttttaaaaaattgaatgtaggtaaaatagagctcagaattcctccaccatcatctgcatttgaatctggggagaagtcagccctcccaactttcacttcctactagaatagcaagacacactctgcctccagacagtgtggattatctgccacccgaactgaagtttcaatcactcaaatcctggtgtcatttacattgtttctactgggaaaggtcaggtgtctgcaggggctataagcaaagaaaaacccatcccctggaaccaccagtgtaaaggagagggaaggcgagtgacagcatgtgtcgatgctggatcattttcaggggtaacagaccactacatcctgaggctttttagcaaataggaagctgaaggacaaacatctgaaggagaaattaatctccgtgagtaggtgacaagctgcgataagcccttggggtgtgtgtcagtgtagcacagatgttagtgtgagaactattacttgattcaagggaaaggggagaagggcagggaggggggaaatgacaatgaaaaacaaaacagtgaaaaccacaatcatcttcaccaggcagctgatttttttaaaaaggcatatatccatcaaaggaacaaaacattaaaatacacccatatggcaaagacctggtgtaactggaattttcacctcctgattttgacagtgtaaatttgttcagcccttttgaagagcaatttggcaatgtgatttcagagccatagaaatatgcacatccatctttcaaatgtcccagctcttataaatgtatctttaaaaagactcaaaaataatttttttaatttatatgcctgaggtgtttatttcagcatctctacaacgagaaaaatgaaaaccgaaggtttgacatttgagacaatattaagtaaatcaatacatgctaatttaatgggatggtattaagtaaatctaagaccagcctggccaacatggtgaaaccctatctctactaaaaatacaaaaaattagccaggagtggtggcaggcacctgtaatcccagctactggggaggatgaagcaggagaatcgcttgatcctgggaggttgaggttgcagtgagccaagattgcaccactgcactccagcctgggtgacagagcgagatcctgtctcaaaaaaattaaataaatcaatatatggtaatctaatgggatgctatgcagcactaaaagtatattttaaaaaaaacttgagaaatgcttctaagatgaataatacacaattaagtcaattacctgacttcaaatattattataactgcatgtggacaagaagacaaaaccttcaaggaaaaaaagttttgatattatgagattatgggtaacattgtattcccagccttgaatttctgttattgttactataatatgtgtacaatttttttttagtgaagtaaaacaaacaagtaaaagaaaggttgaaacttcacaatgtagagatcaaccagcctgaacctctcattttacgggtgacaagttgaatacaaaacttcggtggaattgaacgggcttatttcagtggaaatagtgagaaatactcattttcccaagtgcctattagaggtgctgtcattttccaggagccaatagaaaaacacataaaagcagtgcattggtgtgatctgggctgtttctctgaaatcactcagctcgctttcaactgctgcgttccacaacacaatgtggttctacattaaccacattacatcataaagagatcattaaatgactccttatggaaagggagggaagaaatgatgtttagagaacctggtagtatcggaggcatcatcctccttctctgctgcctatctgtgtcgcactcactcttgaggttatgcaaagaaaatgttgacaatttaggtgccagctgttgtttgacgaatagcaaataaatgactgtgaagtcctttggaaaacagagcaaaaccaaattagtgattcccctcttctgcctcccaacatcttcacctccagggccttctttacactgactatatttcctctgatttcattgtcccaatgagacagtaatcctactgagagaacagatagggttcttggagactagaaattatgtttattgaatggttaaggcattgtttttttatcataagctataatttaaagttactaagaaaacaggccaggtctctgtaatgtagggaagcagagatcagattatcttctgggggatagtggaggagggttgtaaccaccccaagtccttgagtgaggatggaacctagggctcaacagcagaaccctaagaacggatatttttgcctaggcctaagaatgtcatcagcattttatttatttgtttgtttgtttattgagacaaggtctgcctctgtcacccaggctggagtgcagtggcgaagtcttggatcactgcaacctccacttccctggctcaagtgatcctcccacctcagcctcctgagtagctgggactacaggcacacaccaccacacctggatatagttttttttttagagatgaggccttctacattgcccagtttggtctcaaattcctgagatcaagcaatccccccaccttggctcctcaaagtgctgggattacaggtgcgagccaccgtgcccagcctcatcagcatttttagacagctacccctctgtggtactctgtggtgagaaataagtttaagagataagtatgcagttatgaggaaaggtgatagaaccacaccatttttatgaataatatactaaaatatattcttaaaaaacttgtcagttgtatatttgataatagcatatttttacttagtccttattaaagatctcgggaaattcaaatctgtttcatctttgatcaggagagaagatgttgcccatccttagcccagagttagaaaggagaaatcatgtgattggccaaggtggtgatgagagtctcttcagaagggaagacttccagttgcaaggtcaggtgacccaatcaactgcctttgaacatctggaaaaatcttctaaaactcttccttctcaagaagtcctgcaactggagctactaatgaaagctctttccagtagcccttacagctaattttctgttcacatatttgtcttctgctgtaaagagctgtgcctcatagtgtattaagggctggcttttcctttcattgtaagggactttccaccacaaacacaaggccaccatggccagcaatgcacaaaacagcagagtatggtcggcccttaaagacaaggtttgacttactcctctcttctcttttttacagacatgtttctctactataaacttcactcttagctttattttcaagaataaaatatttctgttttcaaattggcatcttacgattcagcagactaacccaagaaataattttatggaataatcatatttcaatatcttatttcttttcaaaggaacatttaaaagcttataaaactaggtataacaatgaagctgtaaaagaaagtaagaaaacacaatcaaagttaaaatgaaccaagctaaaaggtaaatataattattggtgttaggctccatatttgcctacaggcttcctaatattcagagcaaaatggaaaacaaactgttatcctagctcaggtcacagatcgctctggccattcccttttatctgccctgtgtgctttcttgggctcttcttctgttaacaggactctttttttctttggggaggttcttctccaccctctgcctagggctgtcaatcaatgtgccccatcttctacccttctgcataggacccccattcccttgacatggtgattttccagaggatgggtacctaggtacctggccaataagagttcgagatcaataagagtcttcccagaggttaatacatatgctttggaatggagtttattgcccactaaagatgctaagctggaaaaatataaattggggctatccattggctaaattccctgccctgaggagcaggcctgtctccagtgggaggaagaaaactgaacagaggagaattgcaaatggagagagagcaagccctgtgtactgagttctggcttctgtccctgaggccctgaaacctggctgctgcagcttttgattctgaccatgatccaagagtccttccaagcagtgagagcaagtaaattccattctttgattagcaagtctgagtagaactctgccacttaaaacaaaaaaagtccaaattaatacatctttcattattggaaaggaatcagaatatcagtttaacaaggagcccattttattttctaaaattaattttgaaagaattttctcacatgggacttaatagcgcatattgactgatgtaatggacaatgccctcaaccacatttttacagtaaatgcagaagcgaatttcatctgatggtttctagtataaaccttgaataaaagccaagggcataacattaaagcaaaattgagttaaagccattttggaagaattagcccagtgcacatagagtgttcaacatttgagtggctcaattcacccaagaaagcttcaagaagttgaaggacactttttaactttgacagctttcttcatgtgttcctttgtttccccatttacccaaacttctgataaaggttgaataacaagtattttgagattctaattttcaaccagagctaacattttccactactaagtgagaaagggatctaaatgcttcagagactgggggaaattagaggagagcaaagttatgctacttgtatctaaatataagaccacttgtctctgcacagaattgacccctgtgggacctttggggatacctgcaagatatgcaggctgtttttttctatcaataaaccttggattttcaacaacacaaaaacacatcatcaattagatccccagagtcatgaaccaaaacagttttcacatgaaatttattcaaagtaaggatttgtagttacctgttgtgatatgggaaaaccacacagcagcttggcttccagtgtgctttccagagtgaattagttttaaagtgtttattttctttattccctcctccccaatttcacccagtatctgaaccaatgtatccatcaaagtagtgtaatcagagagtctgcctagaaatgtattttagttaatcatggctaataccaagcccttctttctcccagaaatcaggatgatgtccctcttggaattacttttgatttgtgactggttttgatcatgattacacttccagtacctggcgtaatacctagaacaaactcccagtaaatatttgccaaactaatgatagaatcagatttatattttgaaatgagcactctgaatatattctagaaattgtattggatgaacacaaaagtagagtgggaatgcagatgaaaggctctgtgcccacccagaggagggccgcttgtggcttaattcaggcagcaataatgggaactgagagaattgagctggtttgagagatatttaggaggtcagttggtgttatgaaaagataagggagaaagaaggaacaaggccagctagacatgttgtggggcccagtgggaaatgaaaatgctgagtctctcattaaaaaatcattaggaatttcaagagggtaatagtagagcaccaaactgtgcattgtacaggacttttactcataaagccagctctaagaataaaacatcctatattcattatgcccggggcgcttccatttactcactgagtgcctaccatgacagccactgtggtaggtacttaattctacctaaaagcaataatacaggattaggatagaagcccaaatgaagaagaaaccaaacatagctccaatttatagcacctaagagcattttcacctgtaaggaattttttctatttttacaggaaagatcaagggatttgccctgattcttggagtacttaagtgcaaattttgaagcatttcaattgttgaaaacatatcttttttttatatactttaagttttagggtacatgtgcacaacgtgcaggttagttacatatttatacatgtgccatgttggtgtgcttcacccagtaactcgtcatttaatattaggtatatctccaaatgctatccctcccccgtcccccaaccccacaacaggccccagagtgtgttgttccccttcctgtatccatgtgttctcattgttcaattcccacctatgagtgagaaaatgcggtgtttggctttttgtccttgtgatagtttgctgagaatgatggtttccagtttcatccatgtccctacaaaggacatgaactcatcattttttttggctgcatagtattccatggtgtatatgtgccacattttcttaatccggtctatcattgttggacatttgggttggttccaagtctttgctattgtgaatagtgccgcaataaacatatctttttttaaaacttagcatatatctatttgccatctcctgggtcaaaaagccaatggaaagctcaatgaaatctccaaatattcttaggttcaccttgacagatttttttctgaagagcaaaagagactataaaaaaacacttatcaaacatgagagattatgccttaaaaccacttaactcttatttaagatactactctgaaatatgtagatctgaaaacagggaagattaaaactcattttgctaatgagggcttagcccttgaggactccctgggtaaaattgtattatgggcattatctgggtccacactctgccctcaataacaagagaataaaactctcctctggtcataggtggagaattagcagcaccttgacattttgaaagaactagtctatcaaaatatataacagggttgtgacaaaagaatgaatggaaaaatcctctggtaggggtaattgcatatgattgatataacaaattatgattcagcatttactgagctcctacaggatgccatccattgtgtcagatccttctgcatgtgcactgagttaaattctcactgtaagattgacatagaccttatcactgaagatattaacaaatcctatcagttgagggaaattcaggttatgagaggtaaagtggtttatccagggttgtgtagctggttattggcagagccagaacttgaagctcgatcaactccacctataggtcaatactgtcctaagatttctggatacaagtttctgtattttcaaggacttcgttcatgggatttccccgtatcatgaatacctctctcttctgaatcatccctaatgcttgtagacatgttccaatatccctcaccttcaaaaacaaaaagaagatgaaacaaaaccttcttccttactgcactgctgttctcatttgctctgctccctttcacagacctacttcttaaaaaggcatttgtcatcaccatctccactttctcacccaaatttatttattacctttttgcttctatctccacattgccaaattcagtcacttttctgttcttattttattatgtctctggcagtatccaacaaagttggccattctctcctgcttgaaatactttttttaataatatattttgtcatctataacaccatatatcctcggtcttcctcttacaatccttttcggttttcctcttaccatctcctcgtagattcttcttctggaatacttttgccagttcttctgtctttgcttaacgaataaatgtagagtgtttctggaaatctttttctatatgctctttttaggtgacccctccagttgcttggccacctgtgtgagccatgtatctatgactctcaagcatagtctctcccctggacttcagacttgaccacccaacacccaaccaccaccttgaaatccccacttggatgtccagaagatttctcaaacttcacactaataaaacagagtcctagatttctctcctccaatcctggtccacctcccctgtgcttctacatctcagtaaacattaccactctccacttaagaaccttaagacagaaatctgaattattcctttttacttcctcatcaccatactaactcaatcagtatgccctattgcctctacctgtgaaacatctaagtccgttcactttttaaaacattttttaagttttttgttaatgcataataaatgtccatagttttggggtacatgtgataatttaagacattcatctaatttgtaaagataaagtcagtgtacttgggatatccatcaccttttaaaagtatttgtctttttataagctagaaacattcaaattattcttttccagctatgttgaaatgtacaatagattattgtaaactatagtcaccctactgatccatgtaacgctagatcttatttcttctatcaaactgtatatttgtacccgttagtcaacttctcttcatggtcacttttatacatatccatttctttcacccaagttaaagttactatcctatcctgcccgggctacacatggtctcctaacttcaacctcattggtctctttcgatttcttaaatataccaagcagattctttccagcttggtgcctccaaggtaactgtttcctctacctggaacactcttcccttgatccttgcatgatttgctttgtcttgtcattccatgaaaataacttttactctgaaaagccttagccaagcccctaaagtagccccacagtcacatccactctcctgagcacttgttaccatctgattatgtttgttggcttgttcgtttgctgactgtttggaatataagcttcacgagggcagctgtgtaccctgttcaatgggacatcctcaacacggaggcagggcctggtacagcacagtcctcaataaatacttgataacaaaataaataatttatgttgcattttggaataataattatattcttagttacacattagctgtatctagaagactgataatactgggggaccaaattaccttttaaaattatatttaagcctactaaacaacaacttctgagttaacaatattaagacaaataaagaatgacatggctcacaattataaatcagctatggttaaagatactcttaaatagtaaaaaataatcaagaaaatgttatggatttggcctctcaaattatgaccctgttgaactatacaaaatataaacaaagaacaatatctgaaacattattgaaatttactttataactgaaagttagtataagcagttaaaactgaaagtaaatatagacaaaataattgaacatatttgacaaaatatagacatctaaaagtgaaaagcattttaaaagtgagaaaactcctagagagtttgaactattatatggtattttcacctttagattatgaatagcatgaatgagatgataacaatggtaataacaataaattcactataagttcttagaatttagaagataccattctagaagctttccatgaattatctcattaactattactgcagtcttatgaagtgagtattatgatcatttctaatcttatgcatgacaattgagatttaaagagtataactttccaaggtgacaaatttagcaggtgtcagaatccagttctgtcagaagaaataagtagaaaataaaggtgggtttgttggcgactagataatcataataaacattgatataatcgtttataatttttcataaccgtagaaattatacaacctgtgtaaagccaaaatactttggtgatttctgggttcagaagataatgccttttgtagctatggagcttagatcttgtagctatatgtgtttgactgagggaagtggaaattctctaactgggatatcataccaggatgatgaattacctgtgcaaactctcactattgcaaggtcctatctacctggaaatataagattaaggtttgcaaatccacttgggtaagtgtgtctcaagattttaacctatttacttataataattttcgtatttgccacctaagttttatacacaagactaccaaggaatagacataagttgcaagtggtcacagcttgacctgaaaacctatatcagtaaaccagtggagctctccttagaacagtaaggaaaagaagtgtaagatatgacttcagctgatacagtcagcaaatacttcttggatctatctgtcccatacactggtccaggccctggaaattgagcagaggtcaaataacccacttccctcatgaaacttacattgatggaatgaactactttttatatatttaaaataaaaataatatgaaaacttgaggtaatgaatgctgggcacagtggctcacacctgtaatctcagcactttggaagactgaggcaggaggatcatttgaggccgggagtttgagatcagcctgggcaatgtagcaagatttcgtccctactaaaaaaaaaaaaaaaaattagatgggcatggtggcacatgcctgtagtcacagctactcaggaggctgaggtggaaggattccttgagcccaggattggaggctgcagtgagctatgatggcattactgcattccagccttggtgatagagcaagaccctgtctctaaaagacaacaacaaaaacttcaggtaaaagtaaacctttctttcctttcatgtcagagaccacatattgcaatgagagtgaaatcacatgaaacttataaataaaactgcccttctatcagaatgaaagaaaggacaggaacaggtcaacttggttattttctctctagacccgtcattgagggtagccaccagagggctacctagccatacctaggtcacatacctaagtaacctgatacaaaactttctcctacctcctcctttttcccacctgtgaacctaacaccctgaaatttagcatctagaagtatctaaatgaagacagacatataatttttgcccctgagctcccacccttttggactggaattggacatatctctggagccacaaatcagagtcacatagatgtgactgccagcttttgtgacttggactcagtatctttttactgcgccaccttacgtttcactcagacaccatctggtgatggattggtccgtcatgcggtatcagtctgcagaatcatcttcagtactttaaggacagtgcagactagaggaaagattccaggttagatgtcagctatttgccaattagatgacctgggtatgtaatgagaatgcatagccccacttcgtctggtaaattgggactgtaattcttactttgtcttagcccacaggatgatatgtatagaaagtgagttataaactgtaaatgaagctgggcacagtggctcacacttgtaatcccagcattttgggaggccaaggagggaggatcacttgagcccaggagtttaagatcagactaggcaacatagggagaacttgtctctagaataaaatagaaaaacatagccaggagtggtggtatgtacctatagtctcagcaacttgggaagctgagctgggaagatagcttgaggggaggagttcaaggctgcagtgagttgtgattgcaccactacactccagcccgggtgacagagcaagaccctgtctcaaaagacaataatattataaataaataaataaacaaactgtaaatggtacaaatataaaagagcaatactaacgacaaataataatacatataatgaatgcattgataatgacagtgaaagttagaagtgattcttttagcacagagataagagattagctcatggctcaggccaggcctcacagattatctgtctcctggtgggactaatgcaagatctgaagtttggtctgtaactttgtcattttggtttgttctatggaccaaactctggagtactgattaacatcattgtctagcagttgaaagctctctgataaccttggggagtgctagatagaatagatacaattttgccttttgattttcctttgcccaaacaagtggttcacatatgaagatgtcttttggaagggaaaaataaaaattacagattcccatgtaatagggaaactgagtcttaaaatccaacaccaccatcttatttctaagtcgtttttacattagggcttgttataaacctaggttattttgttttgcctacgtgtaaatcttgatggattcaaaaattccccaagtaacttagtgagatttcaaaaagatccttgattttagcagcgtttttataaaactgtcagttacagtagataacaatagcaattctattctcctccattttaaactggaatttactgattcaaatttttaagagaaaaagttcctgaacttgtccccttattctaggggaaaccattttggtgcctgtctatagctacttatggcctctctctcttgttttttgagacggagtctcgctctgtcacccaggctggagtgcggtggcaagatctctgctcactgcaagctccgcctcccaggtgcatgccattctcctgcctcagcctcccgagtagctgggactacaggcgcccgtcaccatgcccggctaatttttttttttctctatttttagtagagacagggtttcaccatgttagccaggatcgtctcggtctcctgactcgtgatccacccgccttggcctcccaaagtgctgggattacaggcgtgagccaccgcgcctggctggcctctcttttttgaatgaggtaaaaaagaagcttgagaggcaaaacaaccaacagcaaataaccctagtgtattcattcattctcacactgccataaagaaatcctggagactgggtaatttataaataaaagaggtttaaatggctcatggttctgcaggctgtataggaagtacagtggcgtctgcttggtttctggggaggcctagggaaatttacaatcatggcggaaggcaaaggaggagaaggcacgtcttacatggtaggaacagaagcaagaaagagagccaggaggtgctacacacttttacaagaatttactcaccgtcacaacagtaccaagggggatggtgttaaaccagtcaagagaaaccacccctatgatccatcacctcccaccaggccccatcttcaacactgggaattacaatagaacatgggatttcggtggggacacagatccaagccatatcacctagtaatcatcctcaccttcagttaaagcagcctgtgtgtttactgaagaaattagctacttgacaccaatcttttcagcaatactgctgtcagataagagaatcattgagtaaaatgccattaattgcaaataataaaacgtcattcattcaaatcacgtaatgagaagtttgaattctgtctccaaaaccaacccttacttttgtttatttatttttacctagtacccagggcatgattctgtctatgctgtcataggtctttagattttagttgccattagcaggcattttcattcaatttatttatttatttagagacagagtctcactctgttgctcaggctggaatgccgtggtgcagtcatggctcactgcagcctcaaactactggcctcaagcaatcctcctgcctcagcctcccaaatctgtggaactgcatgcatgtgccaccacatctggccctggaatatgattttataagaaagctgtctctctattaaagttttatgcaaagaggaaaactaaatcagtggacagagctaagagttagacgacccagactttcctccctccgttgcctctgtttctgtctttgcaaaataaggaaatttgactagcttatctttaaaacctctacttgctcattctatgatggtgccttgagatggagattcagtgagagattcttgtttcagtgcttttatatatttaacaaattttcaccgagtacctattacgtgtcaggacctgctctaggaaatgtggatacaacaatggacaaaacggacaaacctatgtcctcatgtagtttacattctaaggcctataaagtattgtctatttgaacacataaaatgtattctcccagtttgggcagaaacaggacttctgcaaggcctggagaagtaaggaagactgaagcaaatggaatccatggcactttccaattttgtactttctctttctgtctctccttactttcatttcttgacctactcctagacccatgcagataccaaattttacaaattttactaccagcaaatagttatctattatgcagttaaactgtgctatgtgtagggatgcagagcaaatcaagacatagcatatgccttcaagaagccaatgatgtccttgtgagaacaaaactcacatatgtaaaaaaaaattgctagttcaaaatgtcagaggctgagaaccaggaatatggcctgaacagttgtgtgctctatcaggagagattcactaaaagttagtagacttcaggaataattttcagtgcacataaagcttgaacttaagtaacataggtagttttcagattttaaaagcaattttcagtaaatacaagtagagatatggcctgcaaaataagagtaggatatagcaagacacatttcttattcttctgacaaggtagtacacagttcatcactttattgacaagatttattgatgtgactattgtgatgtcatcaacaatggctttgaagttcagaacatgagaaagagctaatggtagggactgacttgaaagcctttgcattctaagaatgatgattaggtttctaatgtattattaaataatgtccagcccacaaaaaagatgaagtctgcaaaggtatacacaataactctgtgccttgctatggtcctatctgatctcaaacaagaagctctttgggttgtgttgctggtggttggatgtgttctgagccatagctaggcttatgcacataacaaagtctgattcccaggaatctttttaggaaacacctcccagattaagtaatatttacctacttgtcctctttgaacagtgctcctactgattctttaccctaatgaagttcatgtcccaacccacacccttttcctaaaacaattaagcttttagtggtgacatgatgaaaaagaaaaaaaaaaaatagatgcaatggctgacttttggaaagttcccagcaaaaaaaaatcccggtggctttctgagtctcagcatgtttcttcttagttctgtgtacactgagataaaagtagagtgggagactgagtttaccacctgtgctaaagcagcagctgttagcattggtgacattcattgttacatggatatcaattgagctgggattaggaagccgcctgtctcctcaagcttgttacgattcagtcacttggaaaaaaacaaaaacagactttcggatgaggattctaatgcccaggtgacctgaaagccaggttcagcgtagtcaatgagcaacatgaaatgaaatttccaatcagaattctcattagccttattcagcactacccagatggatgttccttttgatgtctttgtcatagcagcctcacctatgcaaatattgccagtattaccccttatagtaagttgaagaacttttaagggttgtgaactttacataggtaagtgaatcaagtatacttgaagagcctctctgttgacataagtaattagattattggacaaagatctgatctagtaattttcttagtatgtatgtgtgccaaagccaagagaggatatgttattaattagcaagcaaaatttctaacgtaggggttttcccacatcttaagtaaaattctcgaaacctggaactatggctggctctctggaggtgtttcataaatgcttgctgaattaatgaatgtatccacaggcatcttttaagtggctacaatgacattaagaagaaataaggtcacagagtgtagttgccgcctcaggctctgggaaggatgggtctggaaacaaccccacagtagaccatacacattgtttttgagactttcagctcatccatttggttactgattacaagacggtttttttttttcgtctcaaaaaatgctttatttctcagaatcccatttcagcattattggtttttccctcaccaattctattttcagctttctgccttttctcataatgacctgtaggtgataaattagtaataataaaaatcaataaaaaatgataaagttttttttgggggggaaataggaatgagtttcatgttaagaaaagaaggaacgttccagatggaattttctgtaatgttaaatgtacccatatggcttctgggaaatttaggggcatccttttgtattagggtaacctaatgccacctgctttaaaaattcatattaggaaatagccacattttgaccttcttgaacgatgttcctttatcaatcaaaaatataaagggtgttttatttattagtcattgttgaaatccgtaatctctttctatcgccaaattgtcttaaaacgtctgtccagcacatcattgcaaccttgactgtcccttccactgtgtgttgaagagtcacaggtcccagggggagctgcgaagaaacgtaaaccaaataccatttcagtaactgttaagggacaattgtgacgattttgtaatgcttggcatgttttgcttataatcttgtcctacaaagaagcctatcagcagagatgagagatttttgctatgcaaagattagattaatattgatatttgcagaactgggttcaacctgtgggagacctagtcgcaggtcttgtagaatttatagcatattaagaagatatttaaatatttggcttcagtgtgatggcctcatttctacatacctttctaatatgtgccaactctctcttcttcatttcacttgtccgctgaaagatgagtcatcaagtctggttgaacctatctaatatctcttgaatcagtatgtctctgcatctgtattgccatcaccctagttctggccatcctcactgaccacctgactttctgcctaaatggtctcctactttctggtcttgtatactttcaaccctttctctgcaatcagagtgatattgcttccaatgttgtacagacaattcttacaaggtcctgcagcttttctttcagtctttctttctttttttttttttttttttgaaatggagtctcactctgtcacccaggttggagtgcagtggcgcgatctcagctcactgcaacctctgcctcccaggtttaaacgattttcgttcctcagccttccaataactggggttacaggtgcatgccaccatgcccagccaatttttgtatttttagtagaaagagggtttcaccatgttggccaaactggtctcaaactcctgacttcaagtgatctgtccaccttggcctcccaaagtgctgggattacaggcgtgagccactacacccagctctttcagtcttactgttcgtcatttttttccctcccctttctgcaccctcttcactctgctttcccattctctatgcctgggctacatcttaaaagacgccatgttctcctggggtctctggtgtccctgattctggaaatgctttcctgtctcttctctctaacccatttcacttagataagtcctatttatccttgagatttctcataggtggcagtctttttcccataagacttttcctgttctagacctggtggctcacacctgtgatcctagcactttgggaggcacagccagggcgaatgaacccaggtgtttgataccaacctgggcaacatagtgagactccatctctacaaaaaataaacaaccaggcgtggtgatgagcacctgtagtccaggcatggtggtgagcacctttagtcccagctactcaggagcctgaggtgggaggattgcttgagcctgggaggtcaagacttcagtgagccgtgatcatgccactgcattccagcctgggcaacagagcgagaccctgtcttaaaaaaaaaaaaaaaaagaagaagaagaagaaaagaaaaactttccctgatatatttaggttgagactagacaccctcttatctgctcccacaatgcccacgtcctccatcactgtactgaccatactctggtaattggctgtttatctgtccaatgccttccctagaccagaagctcctaaaggacagagcctgtattcccattcgtagtaccagcgttcagcacagtagctggacctgactaagcaccaagtaaatatttgttgaattaagaaaattaaaaaaaaagtgagaagtcaacagtctcttaatcaattgtaaagaaacactttactaggatgttctgacagctactccaaagtatcaaatattttaagtgaaattgtgatgtctggtgacattttttcaatattttagatttcttacacacaacttattttattttcatccactgaagctctcaagcatcttgttaaaataaaataaattagcttggtttctgtatgtgtgtgtgtgtccttttttggggggaggggggctggtggcaggacagggtctcactttgttgcccaggctggagtgcagtggcaggatcatggctcactgcagcctctacctcctgggctcaagtaatcctcccacctcagcctccctaatagctgggattacaggcatgcaccaccatgctcaggtagggttttttaaatttttcatagagacaggttcttgtcatgttgcccagtctggaatatatatatttttttgacttttattttaggttcagtgatacaagtgctggtttgttatatagataaactcatgtcacggggatctgttgtgcagattgttttgtcactcaggtactaagcccagtacccaatacttactttttcttttcctctctccaccctgaccctccacgcccagatagacaccagggtctgctgttcttgtccttgtgtccatgtgttctcatcatgtagctcccacttaaaagtgagaatatgtggtatttggttttccattcctgtgctagttcactgagaatgatggcctctaactccatccatgttcctagaaaggacatgatctcgttcttttttatggctgcatagtattccatgctgtatatgtaccatattttctttatccagtccaccactgatgggcatttaggttgattcctatatattttttaattgacaaaaataataacccacagaatcactaagtaggggaaagatcagctgctgatattttggatgtacttttctcgagtccaaaggataattcagtcaacttaaaatagttatttaaaaatgtgaacagaatttgtggatgttgagacagattcacagatccttaggaaatattaaaacttttgaaaaatggccacaggctctgaaggaaaagagcagttgggcacttaatgccacaagttactcttataaatcattatgctaatgatagaactgaggtggttcatttgggaaaaaaattgaaataacatttaggaaaagctgagaggctggcgatcaccattatgaagagagcagcctgcactatgattagatgccaccaataaggggaccatatataactgaaggatgactttaggagtcattgtaaacctgtcttctgacagcagcttgagacaggaattgcattcttcctctaaatccttttaatttagtaaagccctttattgaaacatttacaagcaaatgtaaacttttaaggattcttacatcccataaaagcagtaattttggcatatagctcatcaacatgaaatgagtaaaaacatgggaaggcagtactttttgaatgttgtatgccatttggcaaatctacatgttcctcccttttttcgcatctccatgttcctcctaaatgaaggagttgttgttgatgttggtttactttaatatgtccaattataccattatcatctatttatcaaaatagtgccatttaattgccttttgctttaagctgtattttatatgaaagattcctagtgttatttctgtcctttggaatattatccagcagagggaattttaggatctacttgataatacagatttgctaatttccacgttagtacttcagtgttgtttagttacacagtttcgggcctcatgatgtgtttgatgatttgggagtgataaaatgagtcttaagtaaaaatcttttaattaaaacaaacaaaggatcagtttttatgggaaaccagtcagtcagcaagtacatgtgttttaagtccagaaggatgctcaagtggaggggtagagagagagagcccttgggatccagggattgtagagtaactgctcccattatgccaggcctagcagggctgtcccactgtctctgccctcacactgaccacttcattactggttgtttttactgagcatcttttcagagatttctgagaacatggtaattttcccagaccatacacctgagagatcaggtactatgttgcctttaaaaacaacaacaacaacaacaaaaacctttatatttttcctctttttatggtgaaatatggcatactttattatttggagaaagacagaaaacatggtttttttctcccacaggccacaaaataccatcttcctcttacagggaatgagacttttgtataaagaggcacaatttcctgtcccactaggagaaaattattctcttgtctgagtctcaacagaagcttgtgttagttgctgttataaattaaactactactcaacccagcagtcccattactgggtatatatccaaaggaatataactgttctaccataaaaacacacgcatgcttatgttcattgcagcactgttcacaatctaaaagacatgaaatcaacctaaatgcccatcaacagtaaacaggataaagaaaatgtggtacatatataccatggaatactatgcagccataaaaagaacaaatttatgtcctttacaggaacatggatggagctggaggccattatccttagcaaactaatgcaggaacagaaaaccaaatactgcatgttctcacttacaaatgggagctaaatgacgagaatacatggacacatagaggcaaacaagagacactggggcctattgagggtggagggtgggaggagggagaggatcagaaaaaataactgttgggtactaggcttagtacctggatgatgaagtggtctgtacaacaaacccccatggcacaagtttacctatataacaaacctgcacatgtacccatgaacctaaaataaaagtttaaataaataaataaacttggtctccagtgttaaatatgatatgtcatcatcctcatttccttcatccagctattttatattcctcccatctgctctgtcctaatatttatattctgtaggccttatcgtgcatctcttattccttctaaatatgttttactctgcctggttcctccactcttttggctcttgttttcctacttcctttaatgtaacagtaacacagtgagcacttaatagcagtctagaataaactctgtgttcctgctttaatctatatctggtctttatctctcacctttatctttacctctgtcactgtgtggacttacactgaaaacagaactataccatgcccccatctccatgctgagtagctggtttataaatcaggagagacaatgctctttagatattcttaaatttgttataattctttcctgttatccagctcctcaacctcccttcccagctctgtctaccactttgtatcacttaagccacgttttatctacgtcttctctgtcactaacctttagtcccttgaaacaggcacaaccaaacaggactgacattttgcaagtcccttgagattttgcctaatccttcacagcaacctacaaagtcaatctggggctggtggaaattctcctctttcagccttttccttcttttggaatttgggggtgttttcacagagtgatttaccaagaaaacattctaaatcctcaaggatcacttatcccttacctcgtggttgtttgctcgagaccaagcacaactggacatttttgaacttacgtctttctccctaccctctttgttctccttctcccccttcataaaatctgacttcagtttggccttcaagtgagattgacttttagccccttccatttggcaaatccttcaacaaaaaaacagaagtgtcatttttacggggtgacaaagcattaagaagatcgctttttcagccttgctgtgcttcattataggtaagtcctcatgtggcaccttttacaagaggaagtattgtcatgctaacaaaatggtttcagatagtatgaaatcagtggtgagaagaatggctataaggaatgggctctacaattactgtcactctcagcaaaagagaacgcaaggaatgcatatttcatctcatggcgacctgaggatcgtcctcaattccatatgtaatactttctaaataatggtgacctttttcacgtccccttcctgtatatacaaagtactatgtggataatgcagcctgagtgagcttatgagctaatgcagggatttttattattaacaataatcatagtgaacaacagtttattcatgtaagatcaagcaactagtaagtggtagaaccaggactgggtcatagggtaggtacatgtgtaccacttttaaatattgccaaactactttgcaaagtattgaattattttacattcccaacagcagtgtctgggaattacaataatccttatcatgcaatgactggcgtattcattctttttaatttttgacattctaatctgtgtgtagtgccatctcattgtagtttgaatttgcatttcgctagtgactaatgatattgagcatcttttcatgagcttatttgcatatgtatgtcttctttgctaaagtgtctatgcaaatcttttgcccatttattaggttgtttgttttcttatattgagttataactttttttttttttacatattctgcaaacatttttaaccagatatgtagtttacaagtgtgttttcccagtctgtttcttacctttacattcccttaccagtatcttttgcaggaaagatgttaaatctgttgaagtgtagtttatcaagttttttctttggattgtgcttttggtcttgtagctaagaaaactttgcccaaacaagataacaaggattttctcctatttttttctaggcatgttatggttttaggttttacctttatgtctatgatccattttacattaatttttatatatggtgcaagttatggatcaaagtttagttacatgtggatatccaagcatcctaagcatcttttgcccaaaagataatcttttttatactgagttacctttgctgctttgttaaaaataaattgactatgtgtaagtctatttctggtatctctattctgttctattgatctatatatacttatccttaaaccagtaacacgctgtcatcatgactttagctttataataaatcttgaagtctggtaaattaagtcccccaatgtttttctttttagacattttttttggctactgcaggttctgtgtattttcagaggacttttaaaatcaacctgtcaatttctaataccaaaataaagttctttagaattttgattgggattctcacgaatgtgaagatcaacttggagaaagctaacaacttaatattgagtcttatctctcaacttattttggttctttaaaacttctttcaacaattgtttttcacatagagatcttgtatatattttgtcagagttcgcccaaatggtacatttatttatctatttatttagagatggagttttgttcttgttgcccaggctggaatgcaatagcacaatctcagctcactgcaacctccacctcccaggctgaagcgattctcctgcctcagcctcccaagtagctgggattacaggtgccagccaccacacccggttcattttgtatttttaatagcaatggggtttcactatgttggttaggctagtgttgaactcctgacctcaggtggtccacctccctcggcctcccaaagtactgggattacaggcatgagccactgtgcctggcccaaatagtacatatttttgatgctattattaatgacattgttttattaatttatatttcaagttgtttatttctattacagagctttctctactatgctgacatccatctgaggtctcttctcaacagaattgcctttaatgtccacatttctaccaagcttctcttcaaggaaatctatattttttctattactcaccttaaaattcttgtagcctctatccatttcccaattccgaagccatttctacatctttaggtgtttgttagaggagtaccccactttctcgcatcaaagtctgtatcagtcagtgtttgacagagaacagaaccaataggagatggataaataggtaggtaggcagattagtaggtagatagatagataggtagatagatacatagatagataatctatagatatctaatgcctggaaagctaatttttctatatattttctctattattttagttgtttcagatagaaggacaaattggatccctgttactctatcttgaccagagtgaaaatctgattaacttttaatcctcagtctcctcatttgtaaaatgaaaataataataaaatctatttcatgaggttattgggatgttagttttgttaatatgtataaaaacttggtgccttgtacataataaatactcaataaatgtatttaaattttgaacaacatatttgacatattgtgatttccaagtatctatactcttttatgtttgttaatgttatatatggaggcaatctgacttaacatcaaaaaaaaaaaaaagaccattcataagatgtagtcagtaccagtaaatgagagcacattttcctctaattgggtgtgtggatattggttttcaccctacttggagtttctgactatttgtcctagtgaccatcactatattcatttataatattattaaaatcaatggatgagtcattggttaccatgtgtattccggttctgaaacacaccctcctcttccccagccagcactcacctcagtgatacccagtctattgcaggttttttatgcattttctaaattacatgaaagcaagttgacattctttctttgtcttagtcttccataccattattttggcatgtttaaagtatcatccatctgattatgtttggaaataaaagcatgaatttgttaaagacatgtaccttccaaactgcacacttattgtgttttcactttcttatcattgtcccttcattagagaaaaaaatctattctgtgaagtatttggttttttatgcagtctgctctgctctaatatacacaaacacctgattctgcaatgagaattagttggtatgtgattgttgagcagggaaatagtactatttcacagaatttcctttagtttatatatggatttttcttggctgaagaagccagattactggagtaaaattataatctccagcaaaaataaaaaaagaaaagtccacagctcagcccctcctctaaagagttgtacagcgcagccttccacggctcatagcttacagcaggtctcccttccctgccaccaccctcacagcaaccccactggctgagcactctgtttttatttattgtctgagcactcatcagtgcagctctgtttaacatgttacctgtatttccacccaaattttttttttttttttttaagaccaggtctcactctgttacccaggctggagtgcaatggtgcaatcttggctcactgcaacccctgcctcccaggttcgagcgattttcctgcctcagcctcccgagtagctgggattacaagtgcccgccattatgcccatctgatctttgtatttttggtagagacagggttttgccatgttggtcaggctggtcttgaacccctgacctcagatggtccacccacctcagccttccaaagtgctgggattaattacaggtgtgagacactgcacccagcctctaatattttttagaacatccattgtggtagcctcctgccatgctgaacagttggcctgggtggtgcaagttatctcccaattattgggaggtatcaattatcatttttgtttggactttacaaagttttataggttctaagtgatatatcccttctgcagtttttctcataagttctgtttatacagtatgtgattttgcagaatatgagttttttgagattatatatattgcaatatcatagaaacctttttgtttgataatctttgcttaaaataacctcatttattttgtacgaatgtacaaaaataaaacaatgtagtacttattggctgtttttgtggactgaggtagagatgtcaagaagttcaagccaaaaaaactgaaaatagttaacagaaacaggcaaatctcatatatcttgccctgattattttttcattagagtccctcctattgaggaaggttcattagcatgtgatgaaacacattgagggggattaattaggaaatataaaagagtctcaaacttctgatataaggtaaaacacgttaattttatgtgtctttaaaaatgtaattagaaccttctgtttgtcttttctgagacacgtatttaaaatttccctcgactcaactgataatctgtgattttgattttcatcccaaagtgacttttaaaaaagttttggggttagggggatgtggtggctcacgcctgtaatcctaggactttgggaggccaaggcggggcagagggcggcagatcacctgaggtcaggagttcgaggccagcgtggccaatattacaaaaccccttctctactaaaaatacaaaaactagccaggtgtggtggcaagtgcctgtaatcccagctacttgggaggctgaggtaggagaatcacttgaaccccagggcaaaggtattagtcagcagagattgctccactgcactccagcctgtgcaacagagagagactttgtctcaaaagaaaagttttgggtgaaaagtagaaaaaaagtcataactttgtgtagagacttttccctcctgtaattctttttattatcaaatatcaggtattatagggtataagccagtgttcttttttatgatttccagaagtgttaaattttccatgtcttctgcatttgaaagtaataggtttggaaagagaaaagctgttcattcttcaagtacatgtaagtttaagtaccttgcagactttgttttgcaggaagcttccttgccttctccccatatcacctctctgcacctcttcacacccatgagggtctttatagcagtgcagtccataaattgttttgaggtaccaataccagtttcttggatattttcttacttaggaacataaatacttaggctgccattgcgttaataaggaaatgctggatagtcagaatcctacattaacccgagcctaaaatctgtagtatcgcttcaaatatctatgtagaaagcatagtttattaaactaaacatctcctgtaatcccagcactttgggaggccaatgtgggtgaatcacttgaggtcaggagtttgagaccagcctggccaacgtggcaaactctgtctctaccaaaaatacaaaaattagccaggtgtggtggtgcaaccctatagtctgagctacttgggaggctgatcacttaatttaaaacttaaaagacctaatatccagaatctataaggcacttaaacagattcacaagcaacaaacaaacccattacaaactgggcaaacgacacgaacagacacttttcaagagaagatatacacatggccaataagcatatggaaaattacccaatatcactgatcatcagagagatgcaaatcaaatccacaatgagataccatttcacgccagtcagaatggttattattaaaaggtcaaaaaataacagatgctgacagagtaaagggaacgctcatacactgctggtgggactgtaaatcagttcagccgttctggaaagcagcatggcgattcctcaaagaacttaaaatagaattatcatccaatccagcaatcccattactgggtatgtacacaaaggaatacaaattgttctatcatgaagacacctgtacacatatgttcatcatagatagcactgtccgcaatagcaaagatatggaatcagcctaaatgcccatcaacagtagattgaataaagaaaatgtggtacatatacaccatggaatactatgcagccataaaaatgaatgggatcatgtcctttgcaggaacatggatggagctggaggccattatcctaagcggactaacacaggaacagaagagtaaatactgcatattctcactcataagtgggaactaaacaatgagaacctatggatacatggaggggaacgacagacactggggcctacttgagggtggagggtgggaggagggagaagatcagaaaatatacctatagggtactatgcttattacctgggcgatgaaataacctgtacaccaaagccccatgacacgcagcttaccaatataacaaaccagcacatgtacccctgaacctaaaatacaagttaaaaaataaatacataaaaatttaaaaataaaaaataaaactgcaaacgtgccctgctttctggcagtaccccattccctgttccttagttttctctctggcacttatcatttatctattttattcattgtctgtctcccttcactagaggttcatgagggcaaggattttcatgttctgtccactgctatgtccctaacacttaaaaaaaggctttgcattctatagtcattcgatgaaataggctgaatttagctaaaagggagttcatgtcctttgaagaaacatggatggagctggaggccattatccttagcaaatgaacacaggaacagaaaacaaaataccacatgccctcacttatcagtgggagctaaacaaagaaaacacatggacacaaagagaagaacaacagacactggggtctgctgagggcagaaggtgggaggagggagaagatcagaaaaactacctatcaggtactatgcttcatacctgggttacaaaataatctgtacgtcaaatgcctgtgacacaagggtacctgtataacaaacctgcatatgtacccctgaacctaaaataaaagttgtttgtttggtttttttgtttgtttgtttgttttgagacagagtcttgttcttgttgcccaggctggagtgcagtggcgcgatcttggttcactgcaacctctgcctccttggttcaagcaattctccctgcctcagtcacccgagtacctgggacaacaggcgcctaccacaacgccaggctaatttttgtattttttagtacagatggggttttgccatgttggccaggcttgtctcaaactcctaacctgaggtgatctgcccacctcggcctcccgaagtgctgggattacagttgtgagccaccacgcctggcctaaaagtttttttaaaaagagaaaacactttccttaccctttgtagctcattgtctatctaacacaccctgtcactctcatcagccttgaacttcttacaaagccattcaataaaatgaaaggaaataggtgcagtgggccccctctgattcgtggctttgatttctttggtttcatttatccacagtctaaaaatattaaatggaaaatttaaaaaaaaaacaattcataagtgttaaattgcatgccattctgagtagcgtgatgaaatcttgccctgtcccactctgtcccatgcgggacatgaattcttcccctttgtccagcagttcctcactgtctatgcctccgacctgttagtcactcagtagccctctcagttattagatcgaccatggcagtatgggggtgcttgtgttgaagtcacccttattttacttcctaatggcctcaaagcacaggagtagcaatgctggagatttggagctgccaaagagaagccctaaagtgcttcctttgagtgaaaactcttaataaggaaagaaaaacattgaatgctgaagttgttagatcttctatctgttgaactgtgaagaagaaaaaagatatttgtgcatagtatataaagggtttcgtactacccacggtttcaggcatccactgggtgtcatggaatgtatcccctgaggataaggggggattactctatgtattttcgtatccttacatcacttacattatttttcctcagccttgttgaggaaaataaaaacacagaagccaagaaagaaatgagcaagcactggccgggcacagtggctcacacctgtaatcccagcactttgggaggccaagacgggtggatcacccaaggtcaggagttcaagaccagcctgggcaagatggtgaaacgccgtctctactaaaaatataaaaattagccaggcacagtggcaggtgcctgtaatcgcagctacttgggaagctgaggcagagaattgcttgaacctggaaggcagaaaagttgcagtgagccgagatcatgccactgcactccagcctgggcgacagagcgacactctgtctcaaaaaaaaaaaaaaaaaaaagaaagaaaaaagaaatgagcaagcactgaacacctactgtgtgcaaggcacttgatagccttcctgttatttcttcctcactacaatcccatgaagtagttcttatccccattttacaagatacaaaaattgactctcaaaaagcttaagaaatttgcttctagttgcacagtcttatagattttcacttttataagataaaagagcttattcaaatccaagtctgtttgaacctgacaaggaaagccttctctaaatagagtatctgaatccctccctgctcgaaagtctcctttatacgctcatgtttcaaaaatttcacattttttgagatatagatagtacccacccacatcacctctgtttttatggaaaatttacacttaagtggcaattattttaatcagatcgacatcctagagagtgagagttcattgaggaaagaaggaaggtacatttttggatcataatgaggagagatcttgatatttttgaaatttgttttgtcttcccatggtacaaagttttaaaagtacaaaaatatgaacagtaaattctcccttctctcccatccctgtctctagccacccactcctcttctgaggcaagagcagattctgttgccaccttcccaagcaggtagtgcctttaaaaaacaaaaaacaaatgttcacctactatatgcattaccatgcaccttacacttttcatttaataaatataccccagcaatggtgatagcagattttggaccagcagtggggataaagaaggtcctggtcacctaggtgcctaaagagaagcagatgaagagagaagaccctggagaaatgttttcctgttttgcacctgcaggtgcttgacatgcctctgaaaatgatctcagtgctgtgcagttccacagctgcagtggtacccacaatgccaaaacttgggatgcaaaggggcgggggtaatgacaaaaatcagggaaggaggaaccatagcaaccacctgatctgcacactcatgtattttatatacctctcttcaatgcctagtgtccttagacagtaagctccctgaagacacaggctatgcctactttattcatcatcgtgtcttcagtgcctagcaccctgcttggtatgcattcggttcatgaatatatgagggaacctgctgctgctgttcagcattcacacctccatttcaaccccatcagaacctttttcatgcttcctcttttgtagtgtctcagaaactcattctgttttcttcttcatctttttttttttttttttttaatggagtcttgctctgtggcctaggctggggtgcagtggcatgatctcagctcagtgcaacctccacctcctgagttcaagcaattctcctgcctcagcctccctagtaactggggctacaggcttgcaccaccacacccagctaatttttatacttttagtagagacagggtttcaccatggtggccaggcttgtcttgaactcctaatgtcaagtgatccacctgccttggccttccaaagtgctgggattacagatgtgagccactgtgcccagccttcatcttcatcttaaaacttcttccatgttcgctgtggctggggacatgatattcctctttccctcccagttgctcctaaggatgagcaaaaagctcttttcacgtcaggggttgtaccgccaatcactaaaaggaacagttgaaatatcaaacatggagaaattgcagtgattacaaaggaatgcaatggggcaccatacagatctgaatttgccagtttgccatatccaggctgtccctgttgcctctggtccaccttaagctaggtgcaaacccagttggaggaaagaaaggaagttatgtgttctctcttcaaggaagaaaccagataccagcctcaaactcttgttcttaggtcacttctttccttggtccatttcactcctcactctccattcaattaaaggacttgcagattaggttatttgcaagtatttctgtaatttattctcctactcccatttgaagccaccaagcctgtttaatattaaataagcaaatgcttcaagtactatggtgacttcttctgtgcctttgcaactaaagccttccaacagcagaggggagaaatttatatctgttatatacatagatgagtaatttgggaatataaaacaaatatccttcttagaaatatttaaacacagatgcttgattttgtctgatctttctctctcttttttttctctccaaacaactggttacccacacttgtacagtcatgtagagacaaaatgctcatttataattccagataccccatgtaattattgcctatgataatcaggtaatctttatgaaactattcctatacaattttcaaatctcagtttacaatcatgagtattttaccataatcttcataatgccctcttgaatatatttgcttaatatcattttgaatttagtgatatttaagttaacatattttatatgttttcatttcattagtaggcttttaaaaatttacttttttgtgagaatctgatttttgtgagactctgtgaacaaatatcctcactaattctttctaatggtataatgtgaatttgtcattgacaagtgttacaaaaaagacgcatagaaaataaaatattttaggtaatcctaagatagctcttccgcagccagggcaattgggctatgtgtctttgggttgattgttagctctgtcctaaatctctgaatttggagaaggaaaccctggatttgaattccagttcctcaacttactggctccatgttcattccttctttgtcaagccccctaacttccctaaacttcagtgccctcatcttaaatataatgacataatagtgtctctcataagattggtagaattacatgggataattcatcttgcatggtcaggggcacggtctcgggaaccagactgtgtgggtttgagctgctcagtcttggacaaaagattaaatatatctatgcctttgttttatcatctataaaatgggaataaccatagtaccttattcaaaggttgttgtgaagattaaaataaattaatcctgtaaaaatgcttaggtttctggcacatagtaagggcttagtaaaaactaggtatttttacctggtatgtgcaagcactgtatatatcctgatatactttctcatctataattctgtttctgtgcactagtttatatatttatttaatggaattatttttacagatttagtcagattttagaacacaaagcaagtggatacttagtagccataggggaatctgattttgatgtctcctacccaaagtttattcatatttaatattatatatacataagtcttattctttctcttcgtcctttttttttaaaggcaagatctgccttcatcttcggttttctttagtgcttagaagattgccttgctagtgataagtatttttgcttaataagtatatcttgactgtgaaatttgtcaccagttttgaaaggaactctggcagcaaatgaacaaacttaaatccttgtggccagggatcaaaggcaatctcaaaccgaattctataataaagagaagtttggagagagaaagggagtttagtgtaaactcaacttttgaaatccaaaggtatcaggctatcatgggaagagtgtgggattcagctttagccctggggtcacaaagtcatgggtatgctcttatataagtaacttaatcagatctctgtttcctcatctgtaatattaattcccttctcctatttcatagaaatgcttaaaatttttaacagaggtaatatatgggaaaatgctttgtaagctataaaattagtgtacaaatattagggtcactgatactctgtgacgcaattcaatgatttggtagaagactatatatatatgtgtgtgtgtatatatatattatatatatatatatatattatatatatatatatatatatatattatatatatatatggccaaccatatatctattagtagctctctctatatatgttttaaagccaggctggtcttaatcttgtctattgaattcattttgacaagaacagtgtaggatccattagtcctttacaatgaagaacatattaggtgagtcaatacttaattccaaaattttactttagaataagagggatgtctaacatcaattgattgaaggctggaggaaagagcgtggagagaaagaagtaacacactgctctgtgtttttgtgcctctgtctccagaataaaagtggacatgcccttcttcctccttacctctctctctctgtatccctttcagtacatatgtccaacactgccatacacagcctcgctgaaagtatcaggcaaagggagaaacagtgagcattcctacctccagccttgacaacaactatgaagtgtgttgctctaagctctgatcataagggaattagaagcactatgattttttaaaatcaaaatatgcctgtagctccaaaaaagaagaatttgactatagggtctcagctcactgctaggagaggtgtaactgattaaactctggtgcagaatgtatcaggatggaaggaatctgagaagtcaccaagttcaaatccttactttcagtccacagagtcatcctgctgcatttcctttttatgcctgcaaacaaaatgtttctggaactcatttattgtcagtgagtgctccctgggctctgaagcccagagatgttcctccataactcatcagaggcttgggtcatttctgagacaataagttactgctaggtcactgaacatacttggggtaggcagtggggaaggggattctgtgataagaaggtgatcatgtgttctctatttataggaaaatgaatcattctcagggtgatgagcatgtgtcattaaactgttttcctgatcatgaccttgcaccaagctgtttgccctctttgccctgttccctcaggctcagtggtcagggagggtgggccagctggccgagatgtgcagtccagtccagagttcaagaacagtttgaactgtgagactgagagccaagctgactaggtcagagtgagaagccattcctcagcatatgggagctgttagttagtgccctgaagctctctagttatttggggaaggaatgggagaaagcacttagatccctgctgggctcattacctttaattagcttgcttggtctggtggctactgcagagggggaaatctccaaaaactgcaaaaagattgtgcatgatggtgggggaagatactttaagaagggaagaagactctgttgagcttccacaaagaacaggttgttcatacctgaatgcacacagggaatgcacaaattttataaacaagaaggctgggtttgttttttttaagtttttctgtttttaaatttctgtttatttagcgggtacaagtgcagttttgttacatggatataactctggtctttcagtgtaaccatcactcaaatagtgtaccttgtacctattacgtaacttgtcattcctcaccctcctcccaccctcccatctttctgagtctccaatgtctattattccaccctctatgtccatgtgtactcattatttagttcttacttataagtaagaacatgcaatatttgactttctgtttctgagttatttcacttaagataatagccttcaggtccatccatgttgctgcaaaagacatgaattgattcttttgtatggctgagtagtattccatggtgtatatacgttacattttcttgattcaatcatccattgattgaatggtgtcctttgacttatcaaataaatggtgctaggaaaattggctagccatatgcagaacaatgaaactcgttcccctatctctcaccatatgcaaaaattcactcaagatgaattaaagatttaaatgtaatacctgacactataaaaatcctacaagaaaatttagaaaaaactcttctgggcattgcctagggaaggaattcattactaagaccccaaaagcaagcaaatgcaacaaaagcaaaaataggcaaatgggacttcattaaactaaaaggctttggcacagcaaaagatataatcaacaaagttaacactcaacatacaggatgggtgaaaatacttgcaaagtacacatccaatgaagggctgatatctagatatctagaacctatgaagctgtttttaagaacagaatgaggacatgagccaacacccaggattccagtggaaagtgaacagagcaggcacagttaatggaaaatgaacagagcaggtacagttaatggaaagtgaacagagcaggtacagttaacgtcatactttacctttttccatttgcacttcacgaagagatgagctttgatagttaacttctctctctttttctctctgttttcttcttgtgcaaactgggtgatgacattgactctcttcacaggaaagcactaagtgaggattaactaggtaatgagagcaaattggaagggtgatggagatgctccgcaaccttgctgatggatttctcccagcgagagaatctcttcaatgcatctttcatctgtgtcttacaggcagggtgtaccatcgttatctctgcattctgcttaagccatcccctccaaaccctgcctctaaggagctttggcctattccttgaaaggattcttcagttatcccaccaacaatcagaggcagcaggactcaatatccccctgtatggagaaaaactgagacaggagattgggctaagttgtcagtgattcacccccattcctgccctaaggaaaggatctttttctttccttttttttttttttttttttttgagacatggtctccttctgtcacctagactggagtgcagtggcatcatcatatctcactgcagcctctacctcccaggctcaggcagtcctcccaccttggcctcctgagtagctgggactacaggtacatgccaccatgcccagctaatttttgcattttttgtagagacagggtctcagcatgttccccaggctgggctcaagcgatctaccctgctcagcctcccaaagtgatgggattacaggtgtgagtcaccatggcaggccaaaagcatcttctcaaaaatctttcttccaaaatgtatattatacaaactttctggagaacaatttaggaaaataagtattcaaaattcttagaaaggtgcatgattcttgcccactgaattccactttcagcacatgaccattagtctttcatttcttcttctcttcttcacaccagagtgtattgccttcaacaaagaaactaaccacttttagacttgtaattaacctgtcccttcccctcatctgcccacctgactactgaaagtccccagagtctgcttcttagtgggacaccagccttctgcaaggcacttattctctggttatgaacctgtttaaggaaatctatatatttgcacagaaccatggaaatatagatgtgaacaggcttaagtgatcacaacccacattttttttttttttttgagatggagccttgctctgttgccaggctggagtgcagtggcgcaatctcggttcactgcaacctccacctcctgggttcaagcgattctcctgcctcagcctcccaagcagctaggactacaggcacgcaccaccatgcccagctaatttttgtgtttgtagtagagacagggtttcaccaagttgaccaggatggtctcgatctggtgacctcttgatctgcccacctcagccccccaaagtgctgagattactggcatgagccaccacgcccagccagcccacactttttatcagatgaggaactagagactctgagaagacaggtggcttatccaagagttcatacttattcaaggctacagaataaaccagaatctggggcctgtaactcccatatgggcccttctcgagttatggagacttaacggtgtgggacacaaaataggaagaagtagagtaaaactttataaagtaggaaaagaaataatgtttgtactatgtataatggcacttcaaaatccaccattaggagtgtctacagtttcctctgcataatttagaggctgaggccatgtacctcaattcagtccagttttctatccaagaggtgcaagctctaaaataaaggaaaggaatattctttatcagtcatcagcttaatctcaaaatattgtgtgctccataattgaccttcattagggcattatggacaggggcttactatatgctaagctatgtaaatacagatgctcctcagcttataatggggttgtctggataaatccattgtaagttgatccacacataaccctattaaaagtcaaagagcatactgaatgtgtattgcatttgcaccattctaaaatcaatgtgtcccttgtgtaaaatcagttgcatccgaaaagcctgaaacgtgtacatattctttgatctagccatcttattctaaaaatcaaaataaaatcaaaataaaatcaaaatataggtaagttgaactgtcataagttggggaccatgcgtactctgatagtcagtgttatgtatgaacttgaccaagccgcagggtcccagacatttgtccagccattaatcaggtgtgtctgtgggaatgtttctggatgagatgaacatttgaactggtagattgagaaaagcagattcgtctcccctatgtcagtggacctcatccaatcaagaccggaatagaacaaaaaggctgagtaagagggaactactcctgtctgactgctttgagctgggacatcaatcttctggccttcaagctcaaatgcaaatatcagctcttcttgagtcttgaggctactggttttcagactagaatttataccattggctctcctggttctcaggccttcagatttagactgaaactacactatcagcattcctgagtctccaaattgctgactgcagatcttatgactttccagtcattccattccttgtcataactctctttctctttctttctctctctctcctctctctctctctctctctctacatatatatatatatatatatatatatatacatatatatatatatatatatatgaacagatacatcctattggttctgtttctctggagaaccctgactaatatacagttatgtgtcacttaacaataggatatattccaaaaatgtgtcattaggcaatttcatgatttgtgaatatcatagaatattcttacacaaacctggatggtttgctgcacacctaacctgatgcacactgaggctttatgggatagcttgttgctcccagactagaaacctgtacagcatattactgtactgaatactggaggcaatttctaacacaatgacaagtatttgtgtctctaaacatagaaaaacacagtaaaaatatggtattataatcttatgggaccagttgtatatgtggtgtgtcagtaaccaaaatgtcattatgcagcatatgactgtatatatacatttacacttaatcctcacaaaaaccctctgaaataggtactattgttttgattatcaacctaactttaaaactgggaaattatacatagactggttaagttcctcgcccaaagctacacactgcatctggaaggagtctgaattcacccagataccgcgtgctccatctgtttgattcacattctcctaattgtgtcccaaaagcctgaaacatgtgcatattctttgatctagccatcttatcctaagaatttaccctaagtaataatcatggatgtattcaaatatatcgcaaaacatttataacagtaaaaatatctaaacaacttaaatgctaaacaataataggcgattggttaaatgttctatgatgtagttactcagtgaaatactaccttcattacaaaccatgccctcaaggactatttatttacttgggtaatcattcaagctatatagatgagagtaaaaggcctgttacaagcctgaggagagatggtaactaaatatactgtatgctcgatgagaccctgaaattacattttaccatgtttccttaggcttgtagcattccatttttacttctattctgaagcagaaaaaggagattagataaaaactaagaaaaccttaataaaggccgggcgcagtggctcacgcctgtaatctcagcgctgggattacacacatccctgtttttaaaagtgaaatctgccttctatagaacacattcccccacagaaatatactacagaaaacagacctaataaagtggagttttgttcaaatgcttccctcacaatgatgctttaatttgctgaggaacatatgattgatcctagttcacctgctgaacatgcataggcagtgtgcatctctagcacactgattaaaatgaatacccagaggctcaacatgatttcttattaatcagaacatacacaactttgtgaaagggaccttagagccattctctgccccagggtgaactgggacacaggtatagaaacctccaggactctgttggaagagtttttcttctaggttttttttttttttctgttataactgtcctttccaagattaaatgatgcctaggatatcacatcgttcagaagaggttgaaagagggagttatttataaatcctgaaggttctaggaggtttgggcttagaccactttggactcagagaaggctgtgaggtaaggcatgttctaatcttgttgatggaagtcctaatgtgtcttagaagatttctggtcatcactgtctttagggactcagagtcttcctctaagttagtttcaggaccctttgaagtattggcattgctggctcagtccactggctctttggccttcacctgtctgcattatggttatagctgagatgccaggaaaaacacaagatgagtctgttcagctcgaagctgactcaactggtttctaccacctcaattcaaactaggaatgagatatttttcttcctttgctttttagggcaattaatgttcccacatatctccctttttcttgccatttcttagcatcctaaacactaattttgcaaaataatgttgtaaatgctttgcatagtcactatcttatgttgcccttcctgttcacaagacagccgtccgtgtcagttgaagatttctatagatatgcatcatctctgatagataaaggcatgtttcagagactatcctggtgggagtattttacttttgaaaccaactaaatctggttttgctcctgtttgtggtactttatttctccctgtagcaggagagtagtgccaacgtgcctggaaaatcaagtttcaaacctctattgcattttaagccatgttttagaatcttagggtcaattaatattagagttcgacaaaatctctgctctcaaacaaaattatatacaaaagctcagtaagtaaaccaggtaaatgttaaggtgcttcggttgaatctaggtttaggagtccagagaatctaactcaaacctggcagctggaggatacccaagaaactccctgggcttagtagtgtacagtgcgaaaaacagcgatctcatccatgtccttcattttagggagatgatacctaaactttgtgggttttatttcaaagtcacatgttaattagtggcattgtgagggaagcatttgaacaaaactccactttattagatctattttctgtagtgtatttctgtgggggaatgtgttctatagaaggcaggtttcacttttaaaaacagggatgtgtataatcccagcactttgggaggccgaggcaggtggatcacctgaggtcaggagttcaagaacagcctggccaacatgatgaaaccccgtctctattaaaaatacaaaaattagccaggtgtggtggcacgtgcctgtagtcccagctacttgggaggctgaggcaggagaattgcttgaacccggaggtggaggtttcagagcaagactctgtctcaaaaaaaaaaaaaaagaaagaaagaaaaagaaaaaggatgtgaaaggaaagagtttgcaaaaaaaaaaaatgcggcaatcacaatacatttatgtctattcatattatttgaatttgtcattttcttcagtgattttttttccttgggttgttcttatttctacatcattatgtttattatatgaaggaagcagtcagcctcatgtttattctctggtagagaagaggaaaacagtaatttttgagcatgaatgcataagaccatacagtttatggaaatggctgtagcttctctaacctttcccctttcatacatacttgtttccatgtacacttcattccccctttttccccctttaactctctttgtatttgtatccctccttccctatgccctttttactcaattcattccctacatcacaacctgtggtttttgtatctgatcatagttttcaccctattgaaaatcatggctggccaagtacatgttaacaggaaaattctggacagtccctttgtacacaaaccttactgcttagtttcatctgtgcagattgctgtatactcagccctgcagcagagagaccacactgcagcctttagtaggaaaaggataggaatgacaatacactgcagacactttcgtgagtaagttgctaaagcgtcagtaaaacatcatggtgaggcctctgcaatcagcctgcttagatttaaatgacaattctgtcacttacaaatatataaccatttggatagttatgtttgcactttaagcctcatgttagttatctggaatagtatataatattacctacctttagtgtcatcataagaattaaatgatttttgtgatataaagtgttaagtgtggtgccagaccctggcaaagttggtaattgtccccttccttccttccccgctttcaccttccttcctccctccctccctcccttccttccttaattccttctgtccttccctcccttcctcctttcacctccttcccttccttccttctttccttctgtctctttcacatgccttctttctctcttcccttccttccttcccctcaccattctatgagggcataactgggagggttaatagaatggatatctaaagcagcgattctcgaatataggcttttaaccagcagaatcagcattacttgacccgaaaacttgttagaaatgcaaacacttaagtctcacccctaagctcctgattcagaaaatctagggttagggtttaactgtctgtgttttccttgtttttgtttgtttgtttgttttgtcgttgttgtttgttttttgtggttgttttgttttgtttttgagacagggtctggctgtgttgcccaggctagagttcagtggcacaatctcagctcactgcagcctcaacctcctgggctcaagcgatcctcctacaacagcctctgaagtcgttgggaccacaggtgcaccaccacgcttggctaatttttgtatttttggtagagacagggtttttccatgttgcccaggctggtcttgaactcctgagctcaagcaatcctcccaccttggcctcccaaagtgctgagatacaggcatgaagtcactgtgcttggcgttttaaccagcctgccagatgattctgaatttgaatatcctggtgagaggttttaaatcatgcaagtggctgtctgcctccagttaaggtaaaaagggaaaggcctcagcttacactgtggttgagccatatgacaggacatacaaacactattaatattactagagaagcaaccagcaccgttttgaatagctcagtctattgggggtgtgccttctactcaagatgtaaataaggataggaaaaatagcactagtatcaactgccatacaattatttagtcacccttgggtaactaaacagcataggtatgttgatcaaaatgcccttgagtaattgtcagtggaattttgaactctccccaattcaataagatactgctgcaggtattggtgaggtacagggagcatctaaatggactgtctttcattgtctttcttgagggttctaattctttggttttctggagaatattataggatagaatgtatatcagaagtgagacttgggagacctgtgtgacctcccaagcatgacaatattcacagatattcagatccatagaacacttcaggaaattgtctttatgttcaaagatctcatagaacatttagttggatacacttcccacacacatctctccatttgatatagagtcattatcttttcaaactttctttttggtcttttacagaagaacctgttaggatattctcaagatttgttctagtcacacgggggtggagggggagggggggtgtgttatagaagtagctctagatcatttagcttaagagttaaattttttgcaaaaatactttgtggtggatttctgatgccagtccgcataggacttttattattgtaatagtgttttgtctttcttttttaagattaggaaagtatattcaccataatatttgttgttaatcacttattttttatgcaccttttccaaagcaactatattgtccttatcttgaaaaatgaaaataatagcttccagataaatccttatgatagttttgctatcactagatagtggcagagggaaacagaggaaaaggagatctatgcattgtctttgaaagtcaagattattatactaaatgtttttgaagcattttgaaaatacagcgatatttacttataattctcaactatattacagttactggatctaaatgagaagtttgttcatctgtaaagtatttgaatgctaatggtattcttctagtctagtgcattcaattaaaatataacgtgtgttacatatgaagttaaaaatgtttagtaaccaaattaaaaaggtaaagagaaataagtgaagttaattttaataatatattatctttaacctcttttaataatatactctctttaactctttaatatatttaataatatattctcttttatatacatagaacattgtcatttcaacatgtaatcaatataaaaaatatcaattagatattttacattctttttttcacattaagtctttgaaatttagcacgtattttacacttacagtacatcttaatttggactagatgcatttcaggttcccaatagccatatgtgtctattggcgttcgtatcatatttatcatggcagttttaaatgtattaaaatgataagtctataaggtatcttcttaagtaaattctcccaagtataacagatatcagaggtaatatacacctacaaataattattgctaaagtaaaatttgtaaagctattgactgtcagtaaatatgtttaagaaacagtttttcgtattactctaagattgttcttaaaaccagcattgcagttcagtagacaagtgcagatatttgaaataagatgtttttatactacctatgtttaaatttcatgagcttcatccagcactggattttctggattctgagatatgctattcacatttcaacatttatgaaaacagaatacatcttacaattaatgtgttcatttaatgtaatcatacttcttgttttcctgaaactgagttggaaatcatcatggaaaataggttcttctcaacacaggaagagttctcagctattgtatagttgtgtttttgagaacatgcttcagcacttgagagatggatttcctagagtttttcttaaggatcaaaattaaaaggtggaaatatacaaacgctaaataatggaattaagcattggccttggataacagaaggtgaaggagataagagacaactttctgttccagctccactttaaccacaggggacataaatatatgggaccttgtagtatttaaccttgttaatatctccatactgttttgcagtaggcgttggaacagagcttcacatttttctggtggaggagccagtgatctctggatggtgaaaatattctctaaaacagactccacaactacaatgaccagtacaatgtgttttctatgccgctgtcctctgtcaaggggcatcacaagtggctggcctatattcatgtaaaggtagaactagaccccaatcaatgtgccctataaatacccaagtctttaaatacccttagataataaaggtaaaagatgcaagaaaaagaggactgggagagtgggccaagtttatagttctttcaaagtctatttgaattatttaaaaccattctttttttgttaatagattttaattctcatacatgtcacatgtttcttttgcagaattcaaaacatttttaaaaacacccatttcaataatattgcatgcaaggtaaacaagaggttagaataactagtacaacataacgcagcttgactagaatacctcgtcataacacaagtacatcttcttttacatttatgcaaagtgaaacattgtctgtctctctccatagtccagaaaaatctgtggggtaattgctcattgtcccttcacaccctgtttatattgcgcgtcttctattttaatagtcccaataaacagatggaaccacaaaaacacagccgggatggctcagttggtcaatggcatcagagaacttaaagtgcctgatgctgatgactcttccagaaggcaatcctcttatgagggtcagggtctagagagtccacgttgctgctcgtactctctgtgtttaattccagctaacatgacaaagtgcaagcgtatgacaaggactttcagtgtgaccatcagctggaagaagccaagtgcgtacagctcccggtggggtggcacatgctcctcttgtgacttaatggtggcttgtggctccacttcccttgggggttgtttttgttgttcttctctcaggaccacatttattttgatgttttaaaagagaaagaaaagttccaaaaacttcctttctcgtatttcctctttgagatccagcaaaatttctacaactggccttttccagatggcttgcccagaattgctgagagtttgaggcacctcaagctctgggctcaacatcgaaggttctttaaatgtgccttttatcctttagtttctgtcacttgatgatgggtgaccaccctcatctctctctctctctctctcttttttttttttcctactaaacatgagattactggaaatatttcatgattggatacatgctattggttaatccatttaaccaaactcccatcaatggatgtggagtgtttacaacatttttgctctcataacagtgcttgacaatgtagggatttgtcaggttttaatccaaatagggctttatgatacttgccattatactatcagatactttttcccactgatatggtttggctgtatgtctccacccaaatctcaccttgagttgtagtcctcataatccccatgtgtcaagggcgggaccaggttgaggtaattgaatcatgggagcagttttccctcatgctgttcctatgatagtgagtgagttctcaggagatctgatggttttataaggggcttcccccttcacttggcactcactctgtcctgccccttgtgaagagggtgcctgcttctcctttgccttctgccatgattgcaagtttcctaaggcctccccagcagtgtgaaactgtgagtcaattaaacctcttttctttataaattacccagtctcaggtatttcttcatagcagtgtgagaacagactaatacactcatcttttgaatacattatgtgaagtacaacaattttttccaaaccaaaccagacctggctaaatcctttactatagaccccaagattgagagagagggaaaaaggaattgatctgaatcaaatttgctgttatcaagaagtagggtagggaagggaccaatatgagatgtacgaaaattggctcccaaagtacagaaaaataaagatttgacttgcctactcctggcataccatttgtaggttctggccaacatctgcccttctctgagcctggagcttctctctttcaaatgggagataattgctgggcagctagagctcacaggcacgccgcatgatgagtgaggtcatgttaataaagccctgggaaagaaaagcaatgtgaaacagcagggctattaccgttccaagacgattttatacaagtgaagcttaagttcagtgtgatgattaacaagctattagagccaagttattgattcctctatctttagagtagctaatgcagtgtgcaccaataggccacagaccccaagctttccttcttcctgtgctcctgttctttgtaatgatgctttccttaggaaaatgaaaatcacttcgcatacacagtgcaacatctttaaggcaggtgccagcagagaggaaaaacacctaagctgattttgtgtgtttttattattttttctgataataaagattaatgcagatacatgaaaaaaacaaaacataaaaagtaggaacagaaagtcaaatactgcatcttctcacttataaataggagctaaataatgtgtacagacaggcataacagaacggaacaatagacactggagacttggaagggtgggtgagtgagcagggttgagggatgaaaaattaccttagaggtacagtgtacattatgtggatgatgatttcactaaaaccccagacctcatcactatgcaatatatccacataacagaactgcacttatacccataaacttatatttaagaaaagaaatagaaaaaagataatttttttaaagtagaaagagggaaaaaagtaaagcatcatcccaatttctttcaccctgaagcagctagttttgctaatatgatcatatacctatccacacatatgtatatgatcatattaaacatattagtttataacttgttctttgttccttttctaacatactcctcacaaaataatatcattgatagtttcccatttcaattaaaacagatatcaatataatttatcagcaaaatattttatggatgtgtgtacagttttggttaatccatttaaccaaaatcctcttgatgaacacagagtatttacaacatttttgctctcataacaatgctctgatgaacctcatgcattcatctttgagcttttgaccaattttccttctgtggtaaattcctgaaagtagaattgttgggacaaaagatttagagattttgtatctttaaacatattaccagtttgccaacccaaagggtcatatgagattactttctgcctacagtgtagtaaagtgccagcttctcccaacaaccttgccaacgttgggtattgtcaattttttggctctttgccaagctgataggagaatggaatgtctaatggtttttgaattacattctgactgtgctgcatcagactgtaactgaatgcagttgtgatgtatcaggggacctggtttaactcagcacactgtttgaatctgtgtaataactaactatgatataatcaggctttcttgcagttttgaaaaagaagccaaactttcacatggtttaaattactctctcatttacactctccatgtgtgagatcacctgggaagccctttggagatgcccccagtgacccagtacaagttgtcaactgcactccccatgaaagagagattgttctggtccaaaccctatgctctagaggagcatcttggaaacagcactgccctataattgatattgctccattgggtggcctgtggtattcaattcactggaaagtatcaatccctttgccttcagcaataatattttcacagttttgatgtgttttaaaggttattgtctccaggacaggtaattgaggaggcctcacacttcatcagaggccatttcatctttattacacagccacacacaaggcagcattttctcctttcactgatggattatttcaagatttataaggtctggtctacatgaaagcaaacacatgtttgggtacacagtcaaataattcaaagatatagggtcagcaggatcctaatattaaagtcaggacttccagcctgggcaacaaagtgaaatcttgtctctacaaaaaatacaaaaaattagccgggcatggtggctctcgccagtggtcccagctacccgagaagctaaggtgggaggattgcttgagccccaggaagtggaggctgcagtgagccatgttcatgccagtgcactccagtctgggccacaaagcaagaccttgtctcaaaaaatgataataataaataataaaagtcacaactttttcctcttctacctgtgccagagacccactacctaacccacatacacacagacacacacaaacacaccatacacttattcctttcttaaaatgtggctttcaaatatttgctttgcatgcagttttctctgaagatatgaccagtttcaagattatctactctaagttttctgactggttgtcagtcagtcagtttggaaccctgccataacatattttcctcaaattccttgcagatactggaataataatgaatgggaatgttattttgagccgatatttggaaagtccttatttggaattctacaagtttatgtctcctgcccagttcctaagccctctttctagataaccatccagaagataatcatccagcagctatccgggtacattcggctgacttggttagttgggtctaagcagtatatccatgagttctaactcgggtttctcaaactctttttcctttgggtttctcagactcttctctcaaactcaaactgccttctccagtccattgctaaagcttgtatgacctttgctttccctccatttcttgacttgtggcatccactagtcctacattgtaggactagtgtgagcaggtcactcagcctgaaagcactcaccctgggcctctagagctaagttgcctcaacacacttcactatggcttctcagagcacactcaccttgaatgtttagaaaaggtaatctttttggggttcaatgagatcaaaagcacggataccaattttgggatcaggaatcaggaaaatctgggaaatgaagaacgaaatgaggccttaccattttgatacaaagttcatattcaagtgagtcaggagatctggtttaagttccagatctgcctcttactagttttagaatcttgggcaattctaggctggacgtggtggctcacacccataatcccagcaatttgggaggccaaggcaggtgaatgcttgagcccagaagttcaagacatgccttggcaacataggaaggccccatttctacaaaaataaaaattagccaggcatggtggtgcattcctgtaatcccagcaatatggaaggtgggaagatcacttgagtccaagaggtcaaggctgcggtgagctatgatctgccactgcactccagcctgggtgagagtgagatcctctgttaaaacaaaacagaacaaaacaaacaacaaacaaacaaacaaaaaaacaaaaaaaattggagggaatttagttcatatatttgagtctttgtttcctcatctagaagatgtagtaaagataaatgaggtcatatatgattgtccctggcataatattttggtacttattgaaaagcagctattgttttaagtcctttgcatatacatttctatgatttactatatatcagtagcatttctccaacccatcttggctaggcaagcaccactgaatatgaaggaggccaaatagaatgatactatccaagctgcaaagaaacaaacaaaagaaaacatctaaatgcatgcctctttggaatggcatttgcatccgttgccaatatccatagaacaaatgccttcaggcaggagaagttgggataatgtcaatgtttttaatagctgtagtagagtcctatttagaaagcagtaattatctctccatattgattttttacatcccctcaataaatccagaagaaatgtgaagaccatctgtaagtgtgatttttaccaggatcagactctaatttgcaatggctatgtgtctgtttgatttagatcaggggttagcaaactgcagcccacaagccaaaactacctcccccatctatttttataaataaagttttattggaacacacccatcacacccatttctttatatctgtggctgctttcatgctaccatggttgttttatttaattgtaacagagatctaagagatctagagcccatattgcccacagagctgaaaacatatgtacatctaaccctttgcaggaaaaaacttgttaaatcatgattgagattatagtagtattatttctgattgactaggtagtaattggtcccagcatgtaaagtttctaatattaaagtcacacgatagaggagctagaggcttaagaaaagtatacatgaatttatttatttggaataggaagggaaacatccctggtatcatcatgatggcatatagaggcagggctgagagctagaatacagaatacgtcctttgctagaaacagtttctcgggctgggttagagtgggtagaaactatggatcatcctgccgcaggtccaagtaaacaggatttggcgctctacataatggctataaagaaacataaaggtgatttctccaagtgttatgctaggtgagaaatatttaataagtaagagcaatcagaattggtcccatattgagaaagtctgttttggagcccagactaaatagactgtgcagtgagaaatgaaaggtcaatttaggtaacttcatttagggcaaaatcatgacttaggaaatcatgactagataaatatccagtgaagagcagggagagaagattcatcaatggccgtaggttgctgtgaactacagaactgaaacatcaatgtatgaataaagtgctgtattgatggacagatgtgtgcatttttatgtatatgccataaaaaatctgaatcaatttctatttgaaatagagaaaagctagttcagatgttagaaacttttctgacgcaaaatattgtgtaattcataaacaattccttgtgttttagtttacagtatgtccagaatataggacttgcctactgtaatgtataaaacaaaagaacttcaggttgatttatttgttaagtagtagacattctcctaggatgtttatgtttgtgaagatgataaatggaagaatacatccacagaaaatgtagacacaggcccttctctcccagtctcaacaccacaccctacacacacacaatgccttccttctaaccttgtctatactgtctctgcaacacacaaagcatatgcccaggataagcttctctttcaaccacctatcaggctttcaacatgtggtttgaaaagatagtgacattgctatgctctgacatacaccgtaatgtcagtacagcagaagcaagtggaagattctacttttccgataaagatcagttgctgtttcctgtcttgaagacgaaagttgagcaaaagcaaaggtcatctgtgtttatattaacaatgtaagagttatactacattttcgcaacaacatcaggtcattatttatccacttgtcctttttttttttatcattcctttgaactgcctgcatttgcttatcgtgatatttctcagtctgtaaacagcccgagtagctgttctatttctctaaatagagtcttaggtcattttattatccagaattgtaagtcatcagaatgcacccatctgttgtccttccacatctgggctaactttaactctttaagcccatagaaaaagtagaaaagccattgtgatatgagtttgatacttttttcctaccatactgctttccagcatatggttttccctgaaaaatcacaaggaaatatttacaaatatcttatttttctttggacatggcattaaacgtggtagatcctccatctccacttggctctttctgattttctgttaccctaattatccttcctgcgatcacagctgctcagagcctcttcttaccaatttaaaaaacctctaaagatgtgacggctgcctttccagtggccaacaagcagatttccatagcagaggagctgcgactggggcagagagccaaagacagcttgtgccaacagccttgtcaatatgccaatcatcttgttacagtttattacatgcgtgacttgattttcttgcatgtgcgttttagaggtaacaacatattggtaaacctgttttcaatccttttgattaccttcaatttgatagctccttcagtaatgaagaaaaaaatgggctattgtgtttgaattacatttatcaaatgattctaagattgttctaacgtgtgcgacaggataagctctcttttagtcaccaattggagaaatatgctcagtgtcaaggaaatggagaaatgcctcattatttatgttgactaatgtataaatacaatatgaacaggggcggtttcaaccctgcaaacgttttcttccaagttgctctgtattttagctagactagactagattgttcagtggtcacaaactaccccaaaatcttaacagtttacaacaacggaagtttattttctaaatatataacatccactgagtgttggccagcgttgactgggggttgttctccacatcacgtccctaagggaccaacagtgttggaggagtctctcttctcatattgatgttcaccatggcaaaggcaatgatcacagtgaaccacatgctacattttaagcttctacctggacaccacacaagtcacttccactcccatttcggtggtaaagcaagtcaattcaagtctgacttcagcatctttgggaaatataattccaccccaggaggggaagcagatatgggtgaaatgtaataaaattcacctctccataaagtcctagtagcattgttttatttgagtgaattctttttttttttttcttccttacagatcctctttaaaacatcagcctggaaacagtatctgtagaaatcagttttgttagttctaaagcagggcttcattgttgggatgtgttgtctgccttcgttagcagatttcaatcatagccctaaatggaagacacattttagggctgttgctgctatagaactccaggtctttctgcttaacggtttcacacttacgtgtgaagggaggacacccttggccaaaagaaccaaggctgctcagttagctgctggttgtcctccagcaaattcctagaactaaatacctggtgctgaggtgtcacgactcagcaagtcctagaacctgtgcttatgacagcactctgataattcccggttattgcatcactccctgatggaaacccagcttttatttcagcaaaagtaatggattgttccagacccctgacctcccttgaagatgtctttttgttggatctggccctgtatattttccagttggttcaagacctagagaaatttctacagactctctcataccaggtaggtttttgtttgtttgtttgtttgttttgcttttgggataggacctagtcatattcagtccacattggaaagcataaattagtgtaacatacataagcttgttcattccactccatgtgttaggtttttgttagtgaacactgactgcaaaaataccaaggtatagccttatgcaagccaacatagtcacgttggacattagtgatctgagggtggaagtgaaatgaagtacggttttttttttccaagtcaactaaacgaacaggctgtatgttttacaatatgaattgggttgtgatatacaaagtgtttatccaaagttaccctcctctttgttttttagaatgacaagacccaaatgggagaattaggccagaagcaacaatgccctcaggcttagtgaaattgaccaaagtttgaaggtaagtgttttcagaccctggtttcctaggaccaagtcttggcctcatcaaacataatcacagtctccttttaccactttggcccaaacactatgaagccttttgcccactggctcagcttctcttgccatatactgattattaatgccagtaaaatacctaggcaccttggcagtaacttacgcaaatatgtatatttctaattacagggaaattgttagaacatgacttggattagagatacacagctaataattcaagaagaaataatgctttgttttcagtagaggaaaataaaagcttcatttgaataatttttcctcctttctctccctttttgttttgatacttacgcatgggcaataccgtaaactggcaataaaagaagttatcgcaaacagtgtggccatttctcctcagacactggacatcctacatctgttatatggtttaccatccatccacttccttgctatagctccaggtccacaattctttgtcatgtcattgctcttgacctataccatgactgataaccatgtacatttttaagaaaaaaatgtaaattaattaaaataatttaaaaacacatatccatatggtgtttgtgcatatattttgctttttctaatcttatctttgtagttcaaaaaggttaaacctgaatgtgatatgtgtgtgtatggaaactgaatgcactataggttcaaataggcaaggaagttgcttagtaacatcctgttcttgactgtgctatcataatttgcattttccaataaagtgtgtttccagccttaggacagtgctactattattgctggtggattttgtaatgtaagcttgactcattcagtgtcaagatcacctaaggccaaattcccattccacacgaattctctttcaagggatgtcctacccttcaagatgcccttaagaattctggattccttaaatatagaactatttatgcttactcataaaacagggaatgttataatatttctctgcttcactgtgtccaaggaagtagagaaatctggtaccatatttatgagcagcaataaaccatgtgttttgctttttcctaaaacaagcctggcaaactgtttaagaacacatgtgcagagcttgggcacagggtgagagtttggtggcacggagtgaggctagaggtgggcgtgtggagagtctgatatcctgatatcaaagcaattccattcagacttaggcctgagctgctcccagtcatccaagtcatttttactaatatctgacaacttgcaaatattgtgttacgttcaacactgaaaatgaggactgtgcatttccttttgtctaaatgatgattaaatggtgaagcagctacagaagtattgactaacgacagcatccatttactagaaaatatgtcatttgctactgcaaacatttatggtctgattatacctcatgttacactgcaatggtttgggttttttttttttttttgtatttttggtacatcagaaacacttttcccaatgtttgttagtttaagcattgttcaacatttatttattaagcattgactttataaaataggtaccaggaatatgaaaatgagtaagatatgttccctgacatccagtagctcatagtctagagatgtcaccataataataactagcatttattggacaccacctgtgtctcctgaagcctgttacctcatttaattttgacaaaaccttatgaagtgaatattatcacacaaacacacacatttagagaatgaatgtgaggctcagagaagttaaacacattgcccatgatcacagaaccagttagtggcagagttgggatttaagcccagatctttctgattctagagcgtatgttctatctatgaagctcttaccgattttattttatatcaagtgaactgtgtaatacataaagtcactcaggaaacagtactggatggggattatgatactaggcagtgcttactctagcaaataggtatcagagccctggcataggtcctcacttttgctaggattctgtcctactccacccttgctgataaacgggaagccacacgtcctggtccagcacttattctcaggcctcccagggacactcactctccatcacgtagtctcttccctaagtagtctgtgtttccctctgccttgcgggtaacttcatctgtgtgtaccaaacctgtcacccctcttagtagtcctcaaaagacaagacttcaagggagagttaatattctcagagttcatcagaaatacctgtttccaaggtcaagacccaccttagaaaggaggtcttcatataccctgtctgtgcttattttgtgttttcacaacacaaaatattttaacgatgatttaatttagttgtgtattgatagtctctgtcaatctctcagggttttttttttctgagggaaaaaattacattttgtaattttttaatttagaaacaacagcaataacaacttgagtcggtgacttctgaaccatttttgttctgattatcactgtaaacctaaatgtgtgaacactatcagtagggataatatttaccctatgggactgttaagcaatttaagatgagataagaaatgtcacagggaaaaggtgttactccacacatggtagtcgttattatttattgggttgaagtgttggcctcccaaagggcaatggtgatttaatagaatataagcaactaaatcccaggttaaagcagtgaattcctaattgtagaattttcctgttaaactatcaggtgggaaaggcctgtcaagatgtatatggaaggagtgagatccttgaaataattaatacacctggtataactcccatcattaggtaaacctgggctcatccctactagacagtaatagaaaattagaggataaaaggatagtcacaaaaataaatagaatatattgaaagctaactatgtactaaacagtgttctaggcatattttacatttattaattcatttaaacctctcaactccctataaagtagacattactaattatctcccttttacaaaaaaagaaatctgaacctaagagagtttaaaaaatttgcccaagaccacataatcagaaggaagattttgaatctgatttttcctcacagcaaagtccatgcattttccactttatcacaccggtttttgtttttgtttttgtattattatttttgagacagagtctcattctgtcacccaggctggagttcagtggctctcagctcactgcaacctccgcctcccaggttcaagcgattcttgtttctcaggctccagagtagctgggactacaggtgtgcacttgtattttttagtagagacagggtttccaccatgttgcccaggctggtctcgaactccttttactcaagcaatcctcctgcctcccaaagggctgggattacaggtgtgagccaccgcacccagccaatcacactgtatttaatatcacaacgaagtgcagtctgcccttctcaggatgatcttagatctatttttcagcaagtcgcattcgggtggagcaaaagcttttaaatggtggtcaattacacaatgattaaatttagtttaccattataggtcaaagggaagtgggaagagtttgatgactgtgtatttgtcatgtttctagttatagtgtacaactctgcctgtttatctgagtgagtgccaagaggtgaggtcagggcaggggctcttgcacatggcacatactatctgccccacagctattttgacttggacagtcattgtgctgggtggtaaaaattccagtgggctgggtaggacatactggggccctgtttcctctcatctgtgtttgagaactaggcagcattgcatcaaatggaaggaacaagtgatgagacatcaggaaaatatcagaatgaaagagaaatgcaaggctctaaaggaagttccaactcacttcgacaccctccagttagcaaagaggtgacagaatcccaaaagggcaggggagagattatggatagcaggctcctggaggaaaaactaggtatgtccagtagcagatctgtggaaactattagaaaccgagctaattgtggacttcttagcatgcctcaggaaatgggaaggaacttttcccttttgggcttgtattttttccaattttccttgttcgggaaataattaattctttaagcaatgtaacctcctgctgtgatttctcaattccacaaaagagaataattatagattaataatggaccaaaatagaaaaagctaaatgtgtgtagcagataagtaggaaatgttctgtcttgtaaagggtattgtttcggtgcccggcaacacagaaacaattctcatctatgcagctctaaatggatgttagaattcacccctctttcctactggtataaaattttcagtctcagtaggactaacgctttgacacatcctaaacctcaccaggagtaggaaatatttctcatagcataaatattttttcttccttgaactgaaaggtttgtggccttccccatgcatgataactgggcagttttcagaatatacctcacagtaaaacttagacttcacacctgtaatcccagtactttgggaggccttggtgggcggatcctgaggtcaggagatcaagactatcctggccaacatggtgaaaccccatctctactaaaaatacaaaaattagctgggcgtggtggcacgtgcctgtaatcccagctacttgggaggctaaggcaggagaatcacttgaaccagggagtcagagtttgcagtgagccaagatcacaccactgcaccccagcctggcgacagaatgagactccatctcaaaataaaataaaataaaataaaataaaataaaaaacttagacttcaagttttaactattgaaaaacttccatgaattgggtacagtactgagctaaacgttgtatatatgttatttattcaggaaatattttcaggtactatgctgagtgctaaaagcattgttctgccttttaatactaacaatgcctgtgaaaaatatgtaggattatccagactttataaatttaaaacattaggattcagaaaagtaatatgcacatgctcctatactttacatgtgacagactggaatcaaatggtttaggatgccccgaataactgaactcttaatgccccagaagcccagatcgggacccaccactgggagttacagccctctggagccagcttcagaggtgcacaggtttattctcttccctattcaccagtgaaagaagcccagagcctccattccaggcactctgtgcttcccaaagtaacaattacttaatttgacaagataatttaaagagattgccaaaataacttacaggagattgccagtataatcagccctcccatatctggggattctacatttccagattcaaccagttgaagagagaaaatatttgaaaaaaaaaatttaaaataatacaaataaaaacaatacaacatagtatttatatcatattgggtattgtaagtaatgtagagaccatgtaaagtatatggaaggatgtgcataggttatatgcaaatatgctattttatgtcagggagttgagcatctgcagattttgatatggaggcaggggtcctggaaccaacatcccatggatacctgagggacaaatgtaatcaccatgttttcccaggtggatttttaacagtggccttctggagacactatgcctatggtttagtctaattgttaaaaattgggataggtgaagaaagatggcagataggcacaatgggaggcagatatttccataaatgccttttaaatcagatcctttctagattcacttttggctctggatctggaagctatcatcatggcaaccccagagtcccattggtttgcctattggttaggtgggccaaggtgtccacatatcacaaaagagttctcaaaaaatttcttcccaataacgagggagatttatatttaagagcacctttagccaaactgaaggaagggaaagttcacaaatatggtaatagctcaagtcaatgaattagaggctttgtgtagggtaattgttgagacctccccagttgactgaccaaaacaattctttgttggctagcagagttagagaatagaattttgcataatccaagtatttcatataggtcccttctgctgttactggagcactagtgagctattgtatttgtggtcataatattagctgcataggtagttctataaatgtgtctggttaataatccacaaacgtcagtgttttacatttgtaagtaaagaagtctctgtccacagcaaaaacgttaccaggcaatattttttagcattaaaaatataaaataaaatcaagttacttcaaagttctaaagaactagaagtcaataaaattcataaatatttatttttcaataattctggatgtatcttaggatcctaatataggatgtacatcctaatatagttatgtttacctgtcatttattttaattgatatatgccagtacttctatagtaagattttattggtaaaatgttttttattcttcaaaatgcagattcctttcatagggtatattcatctaccattttccattctttgaaatctgaaataagtcctaaccttatacattcaccaggagtgtgtattaatcacttctcacactgctgataaagacatacctgagactgggtaatttataaagaaaaagaggtttaatgaactcacagttccacatggctgggaagacctcacaagcatggtggaaagtgacaggcacatcttacatggcagcaggcaagagagaatgagagcaaagcaaaagggaaaacaccttataaagccatcagatctagtgagacttattcactaccacgagtattgtgtgagggaaaccacccccatgattcaactgtcttccaccaggtccctcctacaacacatgggaattatgggagctacaattcaagatgagattcagatgggaacacagccaaaccatatcagagtgtatactttcattttattcctcaatcttcattccttaagttttcaacaaataatttgcttttgaaaggattaggagcttaagttggctttatagttatccagtaaccttttgatttctccaaccaatgatttgtaaaggaatcttcagattcagatttatcctttcctacttcatcttcaattgctaaattaagcatgagtcccatcactgagataacagtctttcttggacagagttatgccaggtctttttctatgtaaagcagtcatctattaggctgtcgttggtctgtcaagatgaaactgtgtgcattggatccatgtgaatgaacatagaacattatacaaatattgtatgtttctattctttgcttgaagcttctggttacttagatcttatagtgcttcatagtataaaaaatggttaaaatacttaaaagttttaaagataaagatgtcagtgtcacagtgcataactgggttttacatggtcaagtatacacacatacacacacacacacacacacacaatttaaaaaatctctgatgcactatgccatactcagcaccaatccccattacaactctcccaatgtttcctggccaggcaggtcaccaagatgtttgggactgtttatgcctttgcacctactcatcataatattgtgtggggatcaatgggagagatatttggcccatttttaagccatatcaggggatcttccacttcctaaactcacttagacttggaatttaagtctagactattttgtttttaaccttgctaacacctacctacctacctacctattcattgtccatagcctaggtagtcttgaaaaaccctccattcccgcagcttcccccaatgcctcctctgaactcagtgtcactcctgtgtgcctcctttagtgttttttttgtttgtttgtttttgtttgtttgtttgtttttgtcattgcactcaccaccttatattgtaaaagtctattactaaggaagtattcctccctcctttatgtgcagaattccttgacagaaaggataggtcatgtttacctctgtcttgcctccaatgcgcagcatgaagcctggctctatgatcagctctaaagaaatgcttgttgatgggcaaataaactcgagaatctcacaccagagccagaccggaagtttccttcatttcatgactggttttcacaaaaacaagcattagggagagtggaaggaagagcttgcaaaataccttactactgcattatgaatgtggagttgtaattttgaggttcttatccatgaagatggtccttaaaattcagaattttaattaccaacataacaccatcctttcttactagtatcattattttatactatgttttcagtaggacatatctgatggaaatacatttcttttgatattatttattataactggtgagctacattccacccaatagtaaatgcctctcagcaaaaagatagatacttttgatagttaatatattcagatattatgttgtttgtggaaaccataacttaataaattttaaaacagtgtcttctttaaaagtaattttttattaaactttgtattttgaggtaattgtagattcacatgcagctataagaaataatgcaaacaatactttttacccagtttcctccaatggtgacatcttgaaaactatcgcacaatagcacaactttgatattgacactgatacaatcaagatacagaacattttcatccaggcatcccctgtgcttagcccttttgtagctacgtctacttcctttgcccaccctcaccttaaaaccctggcaataattaacattttgtcatttcaagcatgttatataaatggaaccatagagtatataactttcaggtattggttttttccaatcagcataattctttggagattctttacttagcatacttctctggagatttatctaggtgcttgtgtactagtagttcattctttgttatcgctgcatagtatttcatgctagggatgttgagccatttacccattgaaagatacttgggttgtttctagtttggggagattataaataaagctgctataaatactcatacacagatttttgtgtaaacatacattttcatttctctgagataaatgcctaggaatgagtgtgatttctagatctgatagtaattgcatgtttagtgtttttaagaaaccaacaaaatattttccaaaattagatgtgccattttatattcctaccagcaatgtgacagcaattgtttttctgtatcttcaccagcatttggtggtgttactttttttattttagccattatgatcagtgcatagtgatagctcattttggttttactttgcatttctttagtggctaatgatgttgaacatcttttcataggcttatttgcatctgtatatcttctttagtgaaatgcttctctgttcctgttgcctattttctaattagattgttttttgactgttgagttttaagagttctgtatatattcttgatagcagtcctttgtcggatatgtgatttacaaatattttctcccagtccatagcttgtcttttttattctctttactgtttttttccacaaggcaagagcttttaattttgataaaaataactttttatacttaattggcaaccaaatacctaaatgtcttttgatagaaaaacttgtcctagataatgtaaaatcattttacatattcacagatccatctccactaatgtcatataagtttaaaaatcacaaagtaatttgaacagattcctaaattataaattagttaacagttattttttgctctaatctttagttgtacatttacttcaaataaacatttgttaaaaacgtactctgtactgaggaatgaggatacaaaactcataatttgtcatttctttgcttcagggacttacattttactggattacatctaaatttttatttggcagttttattccaggaagatcatgacagtcttgttttctaaatcttaactgccttttgatgaaaaagaaagataaggctttaatttctctagtgaaacctgaagaagtaaaataaaataacttgtatgtcccttcacaagccacagtcagaacactgtcacaatctcgacctttgctccccaaaccctattttgcaaaccagatgctatttctttggacattacaggctattttcaaaatacatcagaacttaacaaaacatcatattagctaaatagcactataagaaactgcttataatattaaaattatgtcttgagtttataattatataaaaattgaatctaccctagagcaaaaattataattaactactaaaaaatcgaataagtgatttttttttttttttttgaggcagggtctcactctatggcccaggctggagtacagtggtgtgatcatggcttactgcagccttgatcttctgggctcaagcaatcctcatcctcccacctcaacccctccagtagctgagaccacaggtgcaccccaccacacctggtatattagtttattttcacattgctgtaaagaactacctgagcatgtgtaatttattaggaaagcaggttaaattgattcagagttcctcctggctggggaggcctcaggaaacttacaatcatggcggaagacaaacaggatgcaaaacacctcttacaaggtggcaggagagagagagagtgagaggggaactgtcacacacttttaaaccatcagatctcgagataactcactgtcatgataatagcaagggggaagtctgcccccatcattcaatcatctcccaccaggcacctcccctgacatgtggggactacaattctagatgaggtttggttgtggacacagagtcaaaccatagcacccggctaattttcttttcttttctttttggtagatatggagtgtcactatgttttgtttccctagctggtcttgaactcctgggctcaagtgatctgcccacctcggcctcccaaaatgctgggattacaggtgtgagccagtacacccagccaagaagtgatttgtataatggcaggattatgaatgattatttctgtgtctttaatttgatcatatttttaaaacagtcattatttttggtcatcatgctatatactacagagagcagtttttaatttgtgaacgtgtaagtcaacttgatttagctgaacatagcagagtcatcaatcaaactgattgatgactaagggtccgcagggtaacacatcatcatagttgtttccatggtgatgaattatgatgtcacaaactcatcaagactgtgactcagtgaaccatctagacagaggatgaaatgcagtagttcaccaacatgtatgccatctttgtattatatggtattattaattaaaacgaagggctgagtatttctttcattgagattacatgaagatattacgtatattcagacttgcctgaacacggctatgctggttttaaattgaaggttttcacaaagcaaaaaattgagaaacagaatttgacatagaattgtgtatttattagaaaagatcttttcttctcatattctgaaaagcacactcattaattacagttaaattcaggcaaatttggcaaattttcgtcagtatacttattcttttgttagttaatagctttgcttttcagttttagatattggtattaaatatataaagagaaaagaccttagtgttctcatgctcagagattaagagaatagttataggtttgaaattaggcactttccctgatagtttttgttggtacatgttttaggttatgtttctatgaacaaccagatgcaaacgtcctggcattcatcctgcctgcttgctgtttgtaccatctccgtggtagcaaccatccaagctgctggaagcacagactgagctctatgagtcaattattttatatacctgggaacgtgctagccttcctgtcactctttgatgtcactatgtagacagtttgcagcctaggcaacatggtaagaccctgtctccaaaacttccaaaaattagccaccaggtgtggtggtgcatgcctgtagtcctagctactctgaaggttgaggcaaaaggaaccctcaaccccaggagtttgaggctgcagtgagctatgatcgcaccactgcactccagtctgggagacatagtgagatgctgtctttaaaataataataataattttaaaaattaaaaaatatctagacaatttctctgctttcaagactcttcaaagatctcaaagagaagctttactctggagtctcaacagaggccattcaaaaactcaacctggtttttcaacaataaattagaaatgtaatgctaacagtaggtgccaaggccgaacatcagggaaaagacattagtgaccttgagttctagactagattttaccagtttctgaccttcaactctggtactcgattttctcataaatgtgagaaaatatcttaaccgtatcacagaattgatgtgagaattcaaaataaagcatatttaaagctcctaggttagtgcttcatttatgaaggtcagtgcttcataaatgatagttatttttttccattcaaaatagagataaaaaagactttatctcactaatgtgtcatgcaaataaggattaatcctgttttctattcctgaagcatacagaatgtgatttctttctccatcatttccatctgactatcatctgggagaacacacagctgctccacatctggtgcaacacaggcagatgtagctgtccagagggagaagagtgtttgcttttctccacctaaacactgaccctcttctgcttagattcaaagactgtcttccttctgcaggtttacctgagcctggactcaaagaattaccttcattatgagctaaaggaagtcaggcccattcttcttctgcctggcccctctggctctttggcacttcccacatcctcctcatttggaaaggcttcatgactttctggttcacaaagcagctctgttgttgcttatttccactacagggaaaaagtgaaacacttcactcagggcgcagaacaatggaagtccctggaaggaaaggcttgcaagagaaaaccaagtggcttctgagatattcgaaagtccagttgttttccctttttaaaaattttcagatgctctttgatgccatttcataaagcctgtgattgggccaaaagtcttagttcaccatgtaccacaaatagtgtactctatatagcatatgcttaactaagaaaaaataaagatttagaaatagatgtattgaggacatgccattaaaagcagcttccattgaatcaactgtttttcagagtactgtcaagattaccttaaactagtctaatcaaggtaggtggtggattccaaacttgggaaaaagtgagtctttgtattctgtgaagtttaataactacccaaggaagaagtgttggatacaacaactatgagtatcttagaaagtatgtcttttttttttttctgagtcagggtcttgctctatcacccaggctggagtgcagtgatgtgattataactcattgcattgcaatcttgaccccctgggctcaagccatccttccatcttagcctcccaagtagctaggactacaagtggatgccaccatgcccagctaatttttttcttaatttcatttttgtagagataggatttcccaggctggtatcaaactctcaaacttcctggtctcaagcagttctcccaccttggcttcccaaagtgctggcattataggcatgagccaccacacccagcctgggtgtctgtctttatgctaaatgtccgagcctttccatttgtcttttgcctcttcataaacctctgctgagctttatcaggtcattcacatctttcattacaggcaagtggtaaacttagtaatatgcttcctctggtgacaatgggcaaaggactagaagcataagtaaagaaatagtagactgaaataagcggattttgacatgcaaaaagatgcagcaaggtgaacctggttaagaaatagactcagagagcttgaacatggaaggatgctaggacaagtggcagctaaggcagaaagacagccatggttccagatgtctggggaaacaatggaaggcagatattacaaagttttccattttgtaccagaagtgtccgtatgaacacaaactcctagtaagtgttcttaattgttctgtgggctgatgtgcatttttctcctacaataggaactagcaatctacatattatttaccaagccttcctagatagaagcatttatgattattttttgtttatataaatgtcttgcatttactagaaaatcatgcttttcgagaacgcatttctattatggagtttcttaaagagagaaaaaaaatgtatggctttagaaaaatcctagtgattttttgacagtatgaactgtattgtgtgttcttgtcttggatcaatatcatggcacaatgctttgatagtgtctgaagattaagatatacaatacaatttcctcccttcccttctttcctttttccttccttcctttttcctttctttcttttccttccttccttcctttctttttctttctctctctctttctcttccctccctccctccctctctctttcctctttctttctgtctgtctgtctgtctgtctttttcttgagatagggtctcactttgtcacccaggcagaagggcagtggccctatcatatttcactgccacctcaaattcctgggctcaagggatcctcccgcctcagcctctcaagcagctgggactacaggtgtgcccctccatgtgcggttaattgtagttttttgtttggggtggttttgtttgtttgtttgtttttgtagagactttgttgcctaggctggtctcaaactcctgggctcaagcagtcctcccactgcaacctcccaaaatgctgggattataggtgtgagccaccatgtccagcccaataccattttcttatgtttcccatatatgcataattttacttgcatgcaattctgaatggatgaaacatgttttaatcacctatttttctactttgtagaagagccaaggtaacatgaactaaatcattaaagcagttgacttgttagtggattgtgataggactcaggcatttcccaaagggggaacccatattttggtaatcccagacattttaattatatttttctatccattcctcaatgccacaatgaggaacagcattctttcctgggaagtctcacaattttgtcaaaagtagaagagttgcctttgacgaatacaaatccagcaataaagaagaacaggtctaacaaatgaggccaccttggaaaatgtcattttgcccctttgagccttgcccatcttacctttagaggaagagatgggactgaatcagttcaaagagcctcgatagctttaaatgtctgtgattgatttttctgcagagcaagatcaaacaaaacagtatttcctagctgctgcccttacatgtagtggtgattcacagagaatttggggaggaaagtagccattatgggatgttttgcaaaaggcaataccaagattgatcatcacctgagggcgatacactatagttgttcctctgtatccatgacagattagtcccaggaccccttgcagataccaaaatccacagatgctcatgtcctgcttataaaatggcatagtatttgtacacagccttgtatatcctcctgaatactttaaatcatctctagattacttataatacctagagttgtataaatgctatagaaagtattgttatactgtatttttaaatgtacattagttttattttttttccgaatacctttttatccatggttggttgaatccacggatgcagaacccatggatatggagagctgactgtaatagtcaaagacaagagtggctggtggtaagcacactatctgtccacaagtgaatttcccctaagaatcctgctggtacatttcttcatttcttgagattattgaaccacgtgatttgcctcactgcttatttcaccttctgggtgacatgggctgtgaatgtgcagttcaaggcctaaatattagccctgattcaaaatggacattaaccaaaaaaacaaacaacaatgatactggccaactgacttctctcacttctctcttctcttttctttaattcattccttacctatttagaatagctgaggctcatttttatcttcttatgacagccagaattgtcatctattaagattaagtaaggaaggcataattgatattcacaaaccaccccaggatttatcagaagtgagggtgtttcatatggattactaattgtctaaaatttggctctaagcacctgaagatcactaggcaggagagaagagtagggtttgttgtacatgagaagaggctgtggggtggggatgttcaccgagaagactgctttggtctttgatactagcatttttccttctatatggttaacaaggcacatattttcatttttatatccccagaataaaggcttgaaaggaaacaaaatctcaaataaatggactaatttgttaaattctggactaaacctcagtttattttaacagctttaacaacggtctctggagctcataacacatatagagcactattggtgtcacacaaaaccttgaaatcagaattgccacagaccgaatctgatctgaaatggcatttcattcaactgcagctttgtgtcacaagaacctgtctctgttttcctaacatgggtatgatgcatattcagaagcagccgagtgatttacttcttttttcattacgcttgtggatttgcatagattcagaaggggcatcttctgggaggtataagagtttatagaaagactaatttcttgactaggcacgatggctcatgcttgtaatctcagcactttgggaggccaaggtgggaagatcacttgagaccaggagtttgagaccagcctggccaatatggtgaaaccctgtctctacaaaaaatacaaaaattagctgggcgtggtggtacatgcctgtaatcccagctactcaggaagctaaggcacaataattgcttgaaccagagaagtggagattgcagtgagccaagattgtgcccctgcactccaacctgggcaacagagtgagactctgtctcaaaaacaaaaaaaaaaggaagattgatttcctgtagacagaaggagtgtttatattggcagcagcaatgcagatcaaaactttggggtcaccctcttgaatatcttatttgtatttcttcttgggttactaaagtcttgaggagaaaaatgaataaaaggcttaagaggattctcatttccatgcaaagcttctccacactcctgagagaagtttagggtcaggaaggaaggtcagacaatataaacctcagcactattcagtaaaatagccatggggaaaaatatggtaagtttgtcttaattcatacccaaggacatttagcgctcagaaaactaaaatactttttatttatttatttatttatttatttattttgagacagagtcttgcactattgtgcgggctggagtgcagtggcgcagtctcagctcactgcaacctccacttgaacctccaggttcaagtgattctccttgcctcagcctcccacgtagctgggattacaggcgcccaccaccacacccggctaattttttttttgtatttttagtagagacggggtttcactatgttggccaggctggtcttgaactcctgacctcgtgatccacctgcatcggcctcccaaagtgctgggattataggcataagccaccttgcttggccctaaaatacttttaataagattgtctcatccttctcttggttttccaatggaaatggtggtatagcaagtccatctgaaacacttctgcaaaataacaatgaagctaatcactgtgggaaacatttacatcatatgtatttgcatacagaggaaattgataatcttgagacatcagcatactagaatagcaagagacatgttttattctattatattctcttagtcagcaatgtttaattgttgcttaaaggaaactgaataaaacgtgggcgcagtggctcccacctctaatcccagcactttgggaagttgaggagagaggatcgcttcagcccaagagtttgagaccagcataggcaacatagtgagaccccatctctacaaaaaatattttttaaaattagtcgagcatggcggtggctccctgtagttccagctacatggagggctgaggtgggaggatcacttgaaccagggaggtcaaggctgcaccctggcctgggcaacaaagccaaaccctgtgtcaaaaaaaaaaaaaaaatacgtaaagcaacagtttttctataacggattgcatggtaaaaggaaggatgactttcttactataactccttatgataattttttccaaagtgttaatcttaggggttgaaatttttataggtaatcattaactttagtagaacattattttaaagtttaggtatttcatctgagtatattactctggctttcctaagctagcttagttatatatgttcacttcagtttgagtctccactaaattttaacatgaacaaaatattatatgcaacaccatagaagcaattgttaaatcattgttacttttaatatcacctaaatctaacctaagtaaatgtgtttatttttattaccaactgatgtagatatacccacatggacagaaaacagcataaaccaccaaaaggacttgaaaattccctcttcaagacttcttttgccaatgactaatgtttaatgctatttgctagagattctggtgccaggaggatttctaaccaggttattttatcaataggaataaaatatcgagggcttaaattagtgtaatctctcaagatcttgaatttgacgttttcataatttttacttaatcatagctcctggggattggaattactcttttagctggcccgagtctgggaggaggatccaaagtctttgagttgttttcttttatttctttttagcccctaaagcactggaaatggttggccctgaagtgctcctaaggtaaccgcaagatgaggcaaaacaggattgagatgaaaaccaagctcacccacatcctacgtcaattagctatttttttttctgtgtaaacaatgggagggaggtggattgtagcttttatggtagaggttcctcggcacctcctgacgcccccaggggtcccccctgccactgccctcagcccaaatataagctgacaacaaaatgtttcttcaaagtgctcattgtttactctattctggcttcttcttaaaggtcatcatcatgttgaattatcttgagaaaatcctctgaagtgtatgtgtgtgtgtgtgtttaggaaggatgtgaggaggattgggaggtgagtctctgaataacaagttgaaaaaagagtatggaggaaagcggtgtttaaaattgtccaaagccatcggccgggcatgatggctcacgcctctaatcccaacgatttgagaggctgaggtgggaaaattgcttgagcccaggagtttgagaccagtctgggcaacatggtgaaaccccatctctacaaaaaaagtacaacaattagctgggcatggtggtgcatgcctgcagtcccagatactcaggaggctgagatgggaggatcacttgagcctaggagtttagggctgcaatgagatgtgagtgcaccaccatactctagcctgggcaacagagcaagaccttgtctcaaataataataataatatataaataaacaaataaataaaattatcctaagtgaaatcagttgttgatagaactgaagtacatcaagcctagtgggactgtggttgtctctccagcctaaaaaaaaaaaagaacaaaaacaacaacaaaaaaacttaactccaaaattgctgttgctccatttatttcaggtgtaagacttctttgagatttaaaaacaatataatcatttacaatgtactttgttggacctaagcataggaaaattcattcattcattcattcattgagtacctgttatatgccaggcaatgcactaggcaccatcaaagatgaataagctatgtgctaaaattcacagtctaacagaagaaacatgaaagcagagtggaaatatactgtggcaatacatatttggatatactggtattaaaaagtaaggatgtttcagctaaatcttttttggtgtttattttttaaaaattcatctattaacttcctacacaccatgcatatattcagctaaatcttaaagtatgagaagaaacatgccattcatgaaagggaagagggagccagtgcatcagatacaacctatgcaatcgtgaagatttatggcagagcacaggatatttggggattggcaggcatttcaaaatggctggcacataaagttccgggatgggaacaggctggcaagagaagagatcatcggagccaaagtaactgaactgtgattgaattttagatatgataatatctataggaaacctggcaacccggtgggcaggtaaatatgatagagcgaagatagaatcttcaggccttcaggggactaagcaggaatagaataattttattgagcactttaagtggacattatgctagattattttacatatttcatctcctttaatttacaccacaaccctgtgagtgcaggttgataaagaattaaataaaatccaggtgaagtagcagcacctatagttccagctacttgggaggctgaggtgagaccattacttgaggccaagagttccaggctgtagttcacaatggttgtgtctgtgaatagccactgcactcctgcctgggtgacacagtgagacctcatttctaaaaaagaaaaaaaaaattgagacagggtctcgctctgccacccaggctggagtacagtcacgcaattacagcttactgcagccttaacccccaggctcaaacaatcctcccacctcagcctcccaaatagcttggactacaggtacatgtcaccacacctggctattttttgtattttttgtagagatggagtttcaccatgttgcccaggctggtcttgaactcctaggctcaaatgatcctcctgcttccaccttccaaagcgctgagattatagacgtgaaccactgcacctggtctagaaattatttaataataaaaaaatgaagacagaattcaatgaagagcatagaagagtctcttaaacctttgttttaagctatgagccaggaaagagatggtggcaagggtgagatggttgcagtgcttttttgttcacttatctcaggcctgtgtgttctgagttaaagacaagtcagttggcaagagaaggagagaggaagcttcccagaaccatttgaaggaaaatttggaaagtcttctctaagggagttgccctcaactaccttttaacacaaatggaggactgaaaaacaaaacaaaacaaaacaaacaggaaggaattgcagatatacagatctttggcctttcaaactatggtatctcttagtactattttatatattgataataattataatttttctcaaacttcccaaaagtggaacattgtgggaaataatatgggagtggacatttgaatttctgtttgactttgcagcagaaatctcttttctaactctctctttcaatctcaccatcagagccatctgattgcttgataacatgattctttttgcccagcccttgttatcctccctcctgccctagtcaccatgacataggctccactcatttctacctaggaacctggatgcactgctttgcactattgcctcctggcaaaacagggcaatgagaaaggaaatggaagcccaaattcagagccctccttcccagcacaagaatgaggagatgccctttttccccggggagggggattcttccctctctcttcagtaattgtctttatcactgtcatgttctagccagtctttattatccccgccacacaaatttcatgttcttctggcagtcaaatcaggaaattcaaggacacaactgctctggcttcgtaaagatggggatcaaattgtttgagttgctgatagcaactctttgcttcttgattctccatgcctcctcaagcttttttggctgaacttttagccttggaacagggtcactggaaaatacttcttaatatccttaatttctaattctaatatttgccttgtttcattttgtttatttggggaggatgaagttcaggtgttcacctatcaaactcacttccttcttttttttagacaaggtcttgctctgtcgcccaggctagagtgcagtggtatgatgttggctcactgcagcctccacctcccaggttcaagtgattctcccacctcagcctcccaagtagcagggatcacaggctcgtgctaccacgccccactacttttttgtattttttggtagagacggagtttcatcatgttggccaggctgatcttgaactcctgacctcaagtgatctgcctgcctcgacctcccaaagtgctgggattgcaggtgtgagccaccgtgcccagccctaacttccttctgatcaagtcattctcaaaaataaacatttaattgactgtcaactacaatgataataagacaatgtttgccttaaatgagctctaaatctagttgaagggataacacatggaatggactggtaataaaaagtgggctttgcttggtgctacagttgtgatgtgaactaaagagggagtgttttggactgactttgagttggggaggctttatggaggaggtgacatttgagttgggccttacgttgtattttatgaaataaaaaaagaggaaagacagtccaagatgagaagacagtataaataaagggacagaggcatggaagggaatttcttggccaaaggatagtaaaaagtacagaaccactaaagtctagagcacataggctagaggctagaataagtgagaaatagctaatcctaggaagataaattggggcttaattgtaaaaacctttgcatgctatactaagaagctttgagttcattctcttggcaactatgagccattacatgtttcaaaagatagatctgatggaaaaacagaagtatagagggtaatattctaatgtgtaaacttctactgtgagtccaaaagaatatggtatctatctctgaaccatgttcaatattttgcttagactgttcgaactatgtaagaataagaaatactaaagtgttttttctctgatataatatttaaataccttttagctatcaattccttctaatttccctttaataagacatttactacaaatagacatcattcccatagcaatcttttcttgagacaaagaggtcagtaggccaggttctgcatagaatataagctatttttccattttagaatgccactctccattgatgtctactctcgttaagtagaaaattccaagaagtactaacaaaattatgttaatttgtgtatgtactgacttccagacatttggaaccagattctgaacctgtaactcatttaaatcttgccgtgactttggtttcccaagttctaggtctttctctgaaaatttaaaatgcttctggaaagatattttccatgacacttttgccttaggaaaaaaatttttggtcaacattggaagaaaaaaaaactgagacaacatatatcttgctccttaacatattctgtatgaaattaaggtcttattgacaatctacgtatcagagcctcgtacacaggagctattgaaatgatgtgtcagttcagaaaatcatgttcattatttctgattctcatcataaacaagcagtaaatcaccgtataaggggtgtatgcattagggcctcccacataaacttcacctctgcgtgtgtaaacattttcttattatcgcaaataatcaacaggagaagagcaaatgcaagtttagcttttctccagaatgtttatcatggttactttaaactgtttataggaaagagtgaactataaatgtctttcaggaggtgggtaggaccatatggctcagaggcttttctgcagtaaaatgtttggttaaattttaggcaacagacagtccttccacagcaattatttgtgatttcgagcatcgttgttgatactcaactcctgaaacaaataacaccgacctaaaacatttataataactgaagaaaccaggttccttttaaccctgctaggatccagctgcccccttgcaacccatccccagtcagctgcagctcaggcaagcccagcctttccatccctgcacatcagactgtggtgcagagaaactccctgtgttcttcaaaacaaacattggatgtaatccacctcaatcttttccatggtgaggctttacaaattttagttttctctaagaagatagcctgtatattcaattgcctgggtaaaagtttaatttctgatgcgtaaagcatatcctgccttgaaaaatatctcaggaaaaataaaggccacaacagtttcatgtgtgcctatatcaggattgctgctgagtaagttgtgaaatgtttttggatttctgagccatttggatttcagaattgtggaggaattctggatctgtattttattgtgtattaccaattattttcctttctcttttatgtgacgggtagtattttgattatttaaaatcatctttgtagaaaaattattggcagctatgaatttcatttcaagatatttaagatgccttagaaacttttctaaaaacagtataataggattgagaaccactcatgtatggcctttactgtttcgaggtttttcttttttgacatgtattatttgatgaaaccctatgagattaggtctttacttccgaaagaagaaaaccaaattcaagggcaattaaaaacttgtcaaatgtctcaattttagtaagaaaaaaaaccgacattggcctagatcttaatctgtgcccagtcctcttcccatccctcttttttttttttttttttttttttttggtggctgctctcaaatttttgggctcaaatgaacctcctaccttggcctcccaacgtgctgagattacaggcatgagccaccgtgcctggccagctaaggttaatttagtattgaagaaatatttttgttatgaatttagtgtagccaagtgtgcagtgtttagaccatctacagtaatgcacattaatggcctaggccttcacattcactcaccactcactcactgactcacccagagcaatgtctagtcctgcaagctccattcatgggaaaggcctcacacatgtataacatttttttgtcttttattctgtatttttctatgtttagataagtttagatgtataaatacttatccttgtattacggttctctagtgctcagtacagtgacttgctgtacaggtttgtagcctaggaacgataggttataccatatagccaaggtgtgtagtaagctgtaccatcttggttcgtgtaaggacattcagtgatgaaattgcctactgacacatttctcagaaggtacccccatcgttaagcaaccattactgtattagaaagcagaaaaacaaattcagctccggacttagcctacccatatagcatcattggccagaagaaaatcactttgctttatgaatcccagttttctgcgggaatgaaatgaggtaccatacgtgatcctaccagcataacacctgccaaatagtgcacattcaatactaaaccatcctttttatgcctataaataaaggatttgtactatatcaagagcttctctatgtctgaagttacaatagagtaattccaaattatctttcatggaatcaaatccctgatgatcccttgattttctgagttctgtgaatttcatcacagcccaatttgacccattactgctaattcagtgtttttattagtaaattatatttccaagttgaatcaaaacaacagtatagcaggcacagcttaagacacaagataaataagttgttgcattcaccagtcaaaatatttttaaaaaatcaagaagcaatcactgaatagttttccttgatttagataccaattaggtttaatgaccaaatgagactgataatcagagctgaggaactcaatcaacaggattgcaacatgctttttttaaacctcttgaaagatcacatcactacagaataaggaaacctatttatttatttaatttgagacagtctctctctgtcacccaagctggagtgcagtggaatgatctcagctcactgcggcctccaccccagttcaagcaatttcatgctcagcctctgagtagctgggactacaggggcacaccaccacgcccagctaatttttttgtatttttagcagagacaggttttcaccatggtggccacgatggtctggaactcttgacttcaagtgatctacccacttggtctcctgagggaaatctatttatgactaatgctgttctttttactaattgtttcattggctgtcagcccttagaggaaaaactgttcaaacaaccttttattcatagacccatgttatttaattttagaattatttcccatgtatgcacaaccgaattttcattttcataacaagaaaacaaattctttaagtgagaaacagtacattttacacccttccttttcacaaaaatctcacagtattttctgacttatggtcttgataattagcactcctgtttgctcgtgttctctttctttcacaagcaatgtgatcttatttttaaaaaggacctgagacaagtagacaattgacccttgaacaacacagatttgaaaagttttggtccacctatacacggattttctcccacctctgccacccatgagagagcaagaccaagccctcctccataccctactccatctgaagatgaccagggtaaagacctttatggggattcacttccacttaattattagtaaatatcttttctcttccttatgattttctcaataagtttcctttatctagcttactttactgtaagaatacggtatagactacatataacacacaaactatgcattatcaactatttatgctgctggtaaggcttctagtcaacagtaggttattaatagctaaattctgggggagtcaaaaggtatatgcagattttcacgggtggttggacccccccagcatccatgttgttcaagggtcaactgtatatcctaattgttatttgacactggaagaaattagatctcctggccgggcgtagactcacgtctatcatcccagcactttgggaggccgaggagggtggatcacctgagatcatgagttcgagaccagcctggccaacatggtgaaaccccaactctactaaaaatacaaaaattagctgggcgtggtggtgggtgcctgtagtcccagctactcaagaggttgaggcaggagaatcacttgaaccctggaggcagagattgcagtgagatgagattgtgccattgcactccagcctaagtgacggagtgagactttctcaaaaaaataaataaataaataaataaattatatctcctcttagaagtttgtccctctcttcaactgaaatctatcacagttcgacctacatggtagttgcattgatctgtccatcctggtgccacatatagaacatctactttgtcagatactgttccacatacagtaagcagaacacatgatcccagtccacatgaaggatggtgtccagtcatgtatggcctgattcttttctgtaaagtgctttcacatttgtagttggttcctttcctagagcactcctgtttttgcattcttgtagaaagcaaattatttccaccctgtcactgatttttttctccaattcaaacaatacgaactagaaaagagaactcccttgtaatataaaaggaaatagaaatccctatgtattcaatgtttttaaagtttaatatgattcctcttagcaataaccagcaaaaagaaaatgtttctactttaatcttttcttttgaactgaagtgttcctctatgtcatttacatgacaattggcccaaatctctctgttaccaggacttggtattcaaagtaagaggcttcattaaatttcaagaggacttttttggggaaagtttttgtttgttttgttgtgttttatcataacaaaacaaggcatagtgaccaggaagatggagtttctagttagtgcatacatatacatgcttatggttacttaatgtgatagaagcaaattattcagatgcctcttctccacagaaggttttggtcttcagcacgtaaagcaacttttttttttttgtttttttgagatagagtctcactctgtcaccaggctggagtgcaatggtgcgatctcggctccctgcaaactctgcatccggaattcaagcgattctcctgtctcagcctcctaaatagctgggactacaggcacgcaccaccacgtccagctaatttttgtatttttagtagagacggggtttcactatgttggccaggatggtctcgatctcttgacttcgtgatcctcccgcctcggcctcccaaagtgttgggattacaggcatgagccactgtgcccggcctcatgtagagcactttaaaagtacattggatccatagtaatcacttaactatgaacttgtatatccatatcaaaacttcatgttgtacagcttaaatatagacaataagaataaaataaataaatgaaaatattttaatatgctgagccatgttctggccatttttctctggccttatgtagctttagcttttcattctcaaagcatggatcaaagagctataagaagaaattaaccagagactttatcctgattgtttcacatttccaaaggcaataaatcagtcatgggctgagagaagagaactgaagtctaccacaacaaatatatttctgccattttttcttttatttcctataggttttgctttatgaattttgacatgatattttcatcatgtgtagatatcatacctctttatgcttttattgcaggtgaagtcatttcctaacatcactgctccctctcccttctcccagcagttatctatgtgaaacaaataaatgttatttgtgaggttcagctaattcagataattagcattaccaagaggcttacaattattctggaatttgtgtttgcttatttgtttccccaaatacagctaaaggagaggagaggatcaccagatcttatagtaggcaaaactatgaattattagtaaatcttcctcctggctttctatctcactggctgctcattctcattgtccttcactctttctcctctgtttaacttccaaatgccaagcatccctgggagtattctcttcatttattacattcactcaaatggttttaaataccatacatatactgatgacacctaacactctagttctcgtctgtgtctccctgaactccagactcgtaggtccaactgacttctgcatatggctgtccagtcggcatctccaattgaacatcgtcagaacaaaacttcaggcttttccccaaccagctcttctggtcttgcccatctcaataaacaccactgctatctacccaattaattgagccggctatctggtagttattcccttctttgcctcactgtcttctgatccccatatcctataaactctaataccaagtatccctggaatcctttcagtttttcctatctttacttcttctccttagtctaagctattatactctcttgcatagtttagcggtagtttttaagccctttttttatttttattttacgtttgccttttctaacaaattctccttaaaacagccagaatgatctctttgatgtatgatttagccaagtgtggtggctcccactagtaatcccagctactccaggaggctgaggtgggaggattgctgggagttcaagaccagtctgggcaacatagtgagaccccatttctaattaaaaaaaaaaaaaaagaagaaggaaacatgaattagattttgttgctcccttgtttaaactctctattggctttttacttcatttagaataaaatgaaactccctgtcctggcccctatttgatcttatttcctgtcactttcccattgtctgttatacctcacaatcactggactgcagttattgctgttcctccgaactacaggccttagggcctttgcaattgctattttctatggctggaacactttctcctcagatctgcaaaagattggtatcttgtttagtcagatctcaaattaaataccacactctcatagaggccttctctcacctcaggctggtgttggtagcagtcattgaacttcacaacaccttatgttaatgttgtgcagaacacttaccactgcctgatattttactgataggtcttttgtctgtttcctgccactcctgcccctgaaatagaaagcaagctccatcagagaagaactttatctgtttgttcacggcagtaattccaggccttggaagagggtttggcacacagatgttacttaataaacataagagtgaatgaatgaaaattgttagaagacaccatctaaagtgagtcagacaatatgtccagcttcttgtgtgtgctaattaatgacactttgtggactatatatctgtatataactacttcatttcttacagagccttgatagatgaaagtaactagacatttaacttaaaaggtgctaggtcatcttcagttccaggctgtaagcattaagattgactgtacacgacctgttaaaaccattttctgggaaaggctcttaagtacctgtcagagtttacaatttgagagcaaacataaataaacccaaacgcctttcaactttgaacatttgatgcttgaaaatcacctctatttaaatttttgctagtcacatcttctcatcttttggtttcaggacctgattcatcagtttctatagatccatttataaactcagtcagcattttactttgccagcctatgagcacaagtaggcaactggaggcttggaaaaaacccagacaacaacaatttgtttttcactggttctgctttcaaacaacttccaagagcacaatacagcaaaaagtgagagttatctatttctcccttcttcatccgaatacaaaatacatcctattttactgctttttttttgtcttttgcctctactttaagacttatctaagaaataaagaaaagccaaccactcgttctatccacagaagaaaaacacacaccagcatagacaacacaaaagactgtgtctagatgttaagactatatatcctataggactataattttcatagatctaaaaagtgagaaacatatatatgtataaaattatgtgggatgcaagttactgagattttgaatatggggctctgtcatttaccctaaaatgttcagtggtcttttctattttttctctattctcagtaaaatagaactttctcaacaattctggctcctactcttccaatgggctcagcttgtctcatgatttaatagtactaaaaaccttttcttaaaaagaaaaaaaatcctttttaaaaaagtttaggtataaataagaaatttctatattatgaaagactggtttgcaaagaaactttaatatcttctggatctcatctcaatcacagtctatgaaggaaataaaataagtgccttctaaaacggcctattatactactatagctgttgtctataaggaaaaagtttgttagtgagttgtattcaatagaaaacctcaaagatggctgggcgcggtggctcatgcctgtaatcccagcactttgggaggccgaggtgagtggatcacttgaagccaggagttcgagaccagctttgccaacatggagaaaccccatctctactaaaaatacaaaattagctgggtgtggtggcgggcgcctgtaatcccagctatttgggaggtgggagaattgcttgaacctaggaggcggaggttgaaatgactctagatcatgccgttgcactccagcctgggcgacaaaagcgagactctgtctccaaaaaaaagaaaagaaatcctcagagaagatatcctagaactatttagttttcccttaatcgagtctgaaaacctcctgtgcccttccaccacttaataatctaaccaactattgtaaaattacctattcttctaaaccaccaaatagttcgaatagaatagccttagatatctaataactaaatgaaaccacagtttacctctctaggcttcagtttcttcttcataaaataagaagcttgaactcgaaaagttttagatgcgaagttcccaaaaatctagtagaggaagcaaaactctgtttggcaccctgtttccttgccctggacttttagcatttctttcttctggtgtaaagtcaaacaaaaaatagagatgaatctctaaatttacctttttattggggagataagagttgcaatacagggcatacacacagacctgatagtcttctgtatgtcagaagaacaaagagaaggttggaggttttacgaaaaggagaaatgtcttgtcctgaaagaaatttcactggcactagtaaagttgtggggagtggcaacctctgattggtgagtgacaacagtgcagtaggtaaaactaatcttagactcacagtggttgtcttagctgctattagataaaagtgatttcaggttacagcaggcagtttcagcagctaggtttgcagagaattacattcctagaacatgatattttaatatacatatccattgtgaaataaatactataggcaagcaatttaacatatttatcactttccatagttaacatttttgtaagagcacataaaatctacttattctgcagattttgaatatacaatacaatattatttactataatctttctgttgtacattagatctctagacacactgattctttttttttttttttttttttttttgagacggagtttcagtcttgtcactcaggctggagttcagtggcgcaatctcggctcactgcaacttctgcctcctgggttcagatgattctcctgcctcagcctgccgagtagctgggattacaggcatgcaccaccatgcccggctaacttttatattttgggtagagacagggtttcaccatgttggccaggctggtctcaaactcctggcctcaggtgatccgcctgccttggcctcccaaagttctgggattacaggagtgagccaccatgcctggcctagacatacagattctacatgattacaagtttgttccctctcatctactttccattttctcctctccctgcccctggtaaccaccattctactctctgtttctatgtatttgatttttttttttttttaagattctacatgtaagtaagatcgtgcagtagttttgtttctatgtctggcttatagttcacttagcaggttcattcatgttgttgcaaatgctagaatctcctttttaggttggataattattccattgtgtatctataccacaatttatttaccgcttcatctgttaatggattcttaggttgttttcatatcttggctattgtgaataatgctgcaatgaacgtcaaagtgcagatatgtccatgaggtgtttatttcatctcttttgggcatacccagaagagggattgctggatcatatggtagcagaatgttttatttggaagggaaacttttatactgttttccataatggctataacaatttgcattccctctgaaagtggacaagggttccctttattctacactctcaccaacacttgttatctcttgacttttttatacgagtcagtgtaactttaaatccacctggcctgatgctaaattatgaatgggaaaaattatattaatacttagaatcctgactgggtgcagtggcttatgcctggaaccatagcactttgggaggctgagatgggaggatcacttgagccaggagttcgagaccagccagggcaacatagtgagacctcatctctctaaaaaataaaatattagcctagtttggtggcacatgcctgtagtcccagctactcaggaggctgaggtgtaaggatcacttgagcccaggaggtcaaggctacggtaagccatgattgcactactgtactctagcctgggtaacaaagcaaagcaagaccatcttcacacacacacacgaaaaaaacttagaattctttttttttttttttttttttttttttttttttttttttgggggagggtctcattctgttgccaggctggagtgcagtggcgatcttggctcactgcaacctctgactcccaggttcaagtgattctcctgcctcagcctcccgagtagctgggattacaggtgcctgccaccatgaccagctaattttttttgtatttttagtagagacggagtttcaccgtgttggccaggatggtctcgatctcctgacctcgtgatcctcccgcctcagtcccccagagtgctgggattacaggcgtgagccatcacgcctggctaaacttagaattctttacattcaaataatgtctggtatttttttacattattttcatgtatattccctaatttaaacttatccccacccccccccaccccaccatgatgtcgtcaacacagaactgttttctagattaggaaactgaggatagggattttaagtatctcgctcctagatcaggaccgcatccaggttgcagaatcccaatccagcactcttccacatagtcacagcactaccccaactctaatctactgatgacacagaacaaaattaaagtccttgtccaaatcccagagttcatgaacacagagatgttaatgctcctgtagttcatactgcaaaaagaatgtgagagcttgtttcatttttcacttagaaaatgtatgagatgttctttctgaaggggttctgtcactaacaggttgcattacttgtacaaccattatatctgaatcttcccagaccgtggtttttttttgtttgtttgttttgttttttattaaatactgtcattaaaccagaactcatggatatctatgtcatttccagctataaaattctagaaacttggggattttacctttttgtttcttattttattttcttttttatcaaaagccttatcacaggtaaaatggtaatctaagcaagaataagctctgtcatgatttatgaagcatggaaattcagctgtggccaggcacagtggctcacatctgtaatcccggcactttgggaggccgaggtgggtggatcacttgaggccaggagttcgagaccagcctggcccacatggtgaaaacccgtctctactaaaaatacaaaaattagctgggtttggtggtgtgtgcctgtagtcccagctacccaggaggctgaagcaagagaatcgcttgaatctgggaggcggaggttgcagtctttagcatgggtgacagagtgagattctgtcttagaaacaacaacaacaacaacaaaaaccaacaacaagcacaaaccaataatagaaactttaaatgattctgagccttgagaggaatgtgattatgcaacctgggaaattcacctgcccatgaatagtatctctgtaattaataacaaagtcttacaggacagtccttgccatcaccatatcataaacgtatattgcttcttttagttcataggaacagggtctcctgctgtgtcatagctgtaggatttagcctaaatgctcagtgagtttgatgctcccttgagcaagcccgcttatttaagaaagtagtttttggatattcatggtttattgctgacagttaacgttctcaaaatagtgagagtcctaaagtcaaaggggaatttattaacaattttatttctgagaggatatgacaacaacaaagacattaataaaaaacaccagcgagctttctggcaatatgtattaaaattttcaaaaacacttatactctcgaatccagcagttattatttcgggaaattgctctaagaatattatctttttatacaaagcattttctgaagagaagtattcaggaaattttcatttatgaacagaaaaagtccaacattatggaaatagtgatataaaatacagcatatatagttctttggtattttacagtcatgtaatcatggagagaaatacttcagataaattaacataataaaccacaatacaaaaaagtatatttacaatagaaaaaaagtttaaaagtgtgttagcaatacaaataaacaaatacaagaaggatctatcacaacaatgctacagtgatgagccttcagataattttcattatttttcttgatacttctatatgttcaaaactttcattaatgagcctgtaataccagcactttgggaggccgagatgggctgatcgcttgagctcagtagttcaagaccaagctaggcaacatggcgagactccatctttacaaataatacatacatacataagtaactaagtaagtaaattagccaggcatagtggtatgttcctgtacttccagctacttggagggctaaggcaggaggattgcttgagcccaggaggtcaaggctgcagtgagccatgtttatacccctgcaatccagcttgagtgacagagtgagaccctatttcaaaaaacaaaatttcactgatgacaataaatattaccttgacatcaaaaaaaaaaaaaaaatccagtgcctggatgatcacccagtagcatctaaaagtgcatttgaatatatatccaggttctgatgccagcattgatgcttgttatgtgacaaaaagaaatcacctaactgctttgggcttccatttcttcaaagtaaaatgaagtggttaaacaggattactccccagatgtctccccaaactttacactggtgtaataattgtttgcaaggatcattgggtgattatgtctaaaagcctgcagttattagtcctcatatcaggaatgtgctatccccattcattttattgtagaacctggtttgctgtgggatagttgaaatttgaagaattcacttggtcagtgtgtttcacggccttgctactttttctgcttggatggactcacttctctatatgattttctctttaaatcagaagtatttgacctgaagcagtaactcctctattcatataatagtgatattctgatacatatgtgaatattataaaaataagtagaatgataatattattactaatattattgtggcagtaataatattatcattcacatgtgatcaatagtaaaagcacacacagcaacccctcaggatttcatcctcaggccattgactcccatcacctttactgatatttagcttagctttacaatcctcccctttgaaaaattcatattttaaccttgcctcccataaagacacacattttttcagatatagaatttgcaaggctgagacatatctttttagaatgaacccaatataaacacaaagcaacataggagaaaagtactagttacatgcccatggcaagaaaatatgcctgaaatggttctgtttattttgttgttgttgtttctgcttggaatttcagcagttatttggcaaagtgattagctagctgggaaggaagaaagctcgtctccatcagccttttgtcagagcccgccttttggtcccggagcccccatgaaagtgtgctgtagaccaggaccactgttgccctgaatgcatgagtatgcagcctttttatcgtaggcttgtcatctcctgagttctgcaatagatgccatgtgaaatccagtatatactcagtctaacacatagctgctgcataagaaaatttctttccatgcttaagcaatttctgcatagagcttaattcatagaaatcacttattcattcaaaaagcattcactgagttcctagtaggggccacatattacgctaaagtagatacaaggataaaccaaatgtagatctgtcctttaaagagtataacatgtagggaacaactacactctacatggcaatagaaagtcacaagtgggtgagaaccacaggagagaaacagtcagagggtgatgacagccagaactggtatgatgtgaaaggtcaatgacatcagaaacggcctcagggattttatagcctggctccttcaatttcagttcttggtataggccagcttttcaggactgttgattgtccctcttctttgtgtgaaattcctagtgcacagagcttctgcagtgcctcttaggtactttgaaaatcccaacgataaacatctggacccaacacagaagcctccaggaagctgtcttgttggcagtcacctacgagcaggcgataaacacaacacattaaatagtatgtaatgctccagggattgcagtcctctgcctcctaatctctctgtcctttcctcttttattgacttgtcaggagcatgacagttgtgcacaaccattagcacacaagaaatgactttcctgtgggggtgatggggactggggaacctactctttgagatagaaagttaccctgatgcagaataattacagtccagcttagcctccttataagcgattaatcttacttttcctcttagcttctgtctgtttgtaacctgaggttgaccgaagttagttcttttagttggttcttgagaaaaccctttcagtctgtatttccaggaataaatcttaactctaatttaaaaaacaaaagggccctataaatagttacttcaaaccctttaatttatagctgcattctcaatgtcttcatcctcccaaaatcactcacctctacatttttgccctaagtacctaggttagcacaacttttcacaacttctctttaacatttctctgaataacgtgaaccttccttatttccttaaaatataaacttatatatgttcttcctaggagattttcaacttttctgttctccacttattactctattcactctgttctctatctgagctgtcactaattagtatctacttaaataaatatttgagcaatttaacattacagttttttttttttttttcagcaagaagtgtgttcattatccattaaaagcctgggagagggactactaatgttacaccatcaatatctatttttagccacttcggttttggaagtgtctcttcttttggaagtgggagaccaagtggaggggaagaacatgaacaagggattgaagccattgagaaagtcatttattcattcgatagatatcttctgagcactgcgctaggacctaaggacagaataatgaaggcagagtttatccttccactagcacagcagtcaaaaccaataggaattaagattgtcagaagtgacaaaactgtacatagacctgttcacataactaacaagggaaacgatggaggtgatgtggaagtctgaacgtggtgcaggaataactcagccaacatccccctcctttgggaaatttagatagatgtaggtagattgagaagtgatataacagtcatgtggcatcattgagagagtcagttttctataatgacaaagacatggaaagagagatgtttagtacatgtacagcagaaggagttgattcacaacgcaatggaaacagaagtcaagaagacagtgaagtggatgaagcaaggagaaatcataaaaacaagcacactgggactgtcggacctcaggggagagtgacgtggatggtaaaccaagtttggggccagagaaaagtgaaagcttgtgctgttcttgttggtagtcatgggcaggctgtagcagggttattattaaaactctgatcccccaagtccaactgaaggggctccagtcactaccccatcatctcagtggtgagatgtagtcaaggcatctaacctctctgcctcagtttcctcatatgtaaaatagagacaatcattataaagtgtttagcagaatgccagatccacagtaaatatcagtaaaaggaaatttataaatttgtaaattgttagggaatggggtgagaccctcaagattctaatcttcaagggaaagaggatgctaaggaaagtcagaggaagcccgagaatcctaagagaggatgatacaagcaaattaattaaggaataagatcaaagaatattgggaaatgtttaatccacttggtgtgggaaaaggacttttttgtttgtttgtttttgagacggagtcttgctctgtcgcccaggctggactgcagtggtgcgttctcggctcactgcaagctccgtctccctggttcaagcgattctcctgcctcagcctcccgagtagctgggattacaggcgccagccacaacgcccacgcccagctaattttttttttttttttttttgtagtagagacggggtttcaccatgttggccagattggtcttgatctcctgacttcatgtgatccgcccgcctcggcctcccgaagtgctgggattacaggcgtgagccactgagcccggccgaaaaggactcttttttttttttttttacacagagtctcgctctgttgcccaggctggagtgcagtggcgccatctcggctcactgcaagctccgcctcccgggttcacgccattctcctgcctcagcctccagagtagctgggactacaggcgcccgccaccacacccggctaatttatttatttttttctttttttcttttttgtatttttaatagagacggggtttcaccgtgttagccaggatggtctccgtctcctgacctcatgatccgcctccctcagccttccaaagtactgggattacaggcgtgagccaccgcgcccgaccatgaaaaggactctttttaacctcttctccatgtctaatctgagtttcaacctttttattcttattctgttataagtacttctcccattcaagagcatataaaactagaattactttgggatgagtgtgagtgggggagagagaaggttgggagatcactagttgtgtttgctggtactgaatcctaccctaatacttccgaaatgaacctcattggataactcaactcttcattatgtttttgctaatcttttaggagcctttttgcaacccaccgtctccctaccctcgttgggtctttttttttttcttcttcagtcagggttttgctctgtaacccagtggggaaagtggcatgatgatggctcactgcagcctcaaattcctggactcaagctattttcccgccttaccttcctgagcagctgggactataggcgcatgccatcatgcgtggctaatttctaaaaaatatatatttttgtagagacatctctctatgttgcatttctggtcttgaactcctaggcgcaagcaatcctcccacctcagcctcccagagtgctggggattgcaggctgtttaatagaagttatcaacatatggagtcatttatgtctattgaaatatgaacagccaattcccttcacttgtcccatttctaattcagacactaattctgtttcagtttaacttggatcaatggacttatctttgcttctgttcagttatctgtttcaacaacaataagattctttatctatatggcatagtgggtgaaaggacacactaaccttacctactgctccttttatgtcagaaaatccattttctaatcactttttcttggacccaagtgagtctgttttttcccctacattttgtaatttgtcacatttacattttaggtgggttgttctaatcgacttttcttataaaagggtagtggttctagatcaatcgccatcaatcatgctaccaagcaatggtgaagtaccctttttaaaatattttatttagaagaatttcttatttcagatacaacagatgatacaagttgaatctagtagggtttagtaagagacaataaacatattaaacaaagccttacgtattttttaaggtgaaaaaaatcccccaagatagagtccgtgcttagaaactacccctgttaaatacttaatatataacatttgtaatgttcaaataccgaaagaaaaaaatgtacttgttcagagtctattcttgagtcaacctaccttctcagctctactgaccccaaacaaggtaaacaagctgatttaagttacaactaacttaaaaattatacatctaactcttttgtaaataactttagggctggtgctcaaaataattggaactagctatgaaaagaaagctagaaatgagaatgaggaaaattggtagtaagtgtctatagagaagtgtggaccatctgcaattcctatatttaaacagggagaagagggagatggggactcactctctccctcacaaccacatgactaaactggcccagccaatatctcatcaggtgtctccaccactttacaaagccactgggaatttatcaagggataaatacaaaactggtgtagggagaggggaatgggaagttacttccaaagactctgaccctgagttcttggcgtttattcttttttttgagacagtctcactctgtcgcccaggctagagtgcagtggcgcgatatcaactcactgcaacctctacccctgggttccagtgattctccagcctcagcctcctgattagctgggattacagacacccgccatgacaccctgctaatttttgtaattttagtagagacagggtttcaacatattggtcaggctggtctcgaactcctgacctcaggtgatccacccaccttggtctctcaaagtgctgggattacaggtgtgagccaccgtgcccggcccttggcctttattctttattttccctgatattaatccctaatgaaatgcatttagtacacattcatctttttaaaatgtgcagtttttgtcacagaagtagtgtaaaggacaccagaatggttggaagacgatttttgtggtcttctacaagtcctgttttggtgactctgagcaagtcttaaccttgcctacatttcctcacatttagggcaagtgtactcttcagggtcaactgcaatatctgtgggagtgctttgtgttttgtagcatgcatcttactagtgcttttgttgttgtttgcgttgtcgtgcgggttccccacctcccccataacactgtaaagaaatgctgagactaagtggtagggagtggcagccatctggtgaggatggaaagttaatatctttatttatgtaataaacctccctttagaattctgttactgtcaaatttctcctggaattctaatagtattttcgctatgtgttttgaccttttgctattgggaagacacaagtttatgaatgacaaatgggtaggggaatttaggctgcacagttaagtaggaagaatgaagtctttgctagagttagaatccagtttgaccttgaacaagttactcaatgactaagctccatttgcaaaatcgttttgttaaagggattagaggtaacatatctacatatgtacatgtgtacagtggtatggagaatggactggatgaatgcgtgctgttaccaatgtgataattactattctttttaaaaatagagtattttatgcatacacaatacttattcaattcaatttgccttagtgcacagtgatggaattttagaactggaattgacttcagaaataatctggtaaacgaaatcttttcgaggctcttcattttatggttgaggaaactaacatcctgagagctaaaagtcatcgttttcctttaaaatatctaaataatcccagatgttggatcagaactccaaagtcataatcagggcttttcctatttctatagtatttctaatactataacatgctattgctcagtcttttattctctaattccatcctggtttctagaccaaatatacctaattgtattctaacccacaagtacctcatcaatgagaagtctgacctatggtttatgatttccgcagacttaaatcaaccctgggcttctatccttatactagttttattttatgttttttgtttgtctttagagaaatgatcgtgttctgtcatccaggctggagtgcagggacataatcacagctcactgcagcctcaaactcctgggctccattgatcttcctgcttcaacctgctgagtagctaggactacaggcacgcaccatcaggcccaactacatttttaaatttttttctagagacgatgtctcgccatgtttcccaagctggtcttgaaccctggcctcaagcaatcctcccacctcagcttccctaagtaccaggattacaggcataagccactgagcccagccccacccttacatgttttctcttggcatcctgatccctggacacaaccccattgagatacccttccatttaatacttttcttagtcatttaccaaatgtgtttatagtaatatattcccatatatttgtggcagagtacagcactcatataaattttgatgaacacagacatgctgtcccatacttgtaggtaaaacaatcatgtgaaattaaaataaatattttgtttagatagatcttgactatcatacacttattctaacaatattgcccattcctcaaaacattctgggaactccttgaaataaaactgactatggtaagaagagtttttctgggagttgggaaactgattccattagaaggcagatggtgatagtctcacagcacactctctcccatgcggtctctattctacaggcatgcagatatttccaaaagcatcccttccctccagggtcctgaagaccctacctctggttctgccttggactgctctcagtgatattccctttttttttttttttttggacggagtctcactctgccgccaggctggagggcagtggcaccatcttggctcactgcaacctccgcctcccaggttcaagtgattctcctgcctcagcctcccaagtagctgggactacaggcacgtgccaccacgcctagctaatttttgtgtgtgtgtgtgttttttttagtagaggtggggtttcaccatgttggccgggatggtctcgaactattaaccttgtgatctgcccacctcggcctcccaaagtgctgggattacaggcgtgagccactgtgcccggccgatattcctgtttttatggttgcaattgtatgctatggcaccggtactatgtgggaagaatgatgctaggtactctactggtatggcctcatttgtcgatttgaggattattggtttatttatgcaaagcacataggatcataggattgctctctaggagaatggagtaattaataccatgaagactcatagacaatgcttcctcccctagaaactcattatttttcgaattttggcactgatctttcctgcctacttcctggcttttactaccttgtgaaaaagccccaagtgttagaagcagcttccccagcttactgccatcccttctaaggtccctggacaccactgcttgtctcctaccttagaaagtgcctacttggccaggcacgctggctcacgcctgtaatcctagaactttgggaggctgaggcaggaggatcacgaggtcaagagatcgagaccatcctggccaacatggtgaaaccccagctctactaaaaatacaaaaattagctgggtgtggtggggcatgcctgtagtctcagctacttgggaggctgaggtaggagattcacttgaagccgggaggtggaggttgcagtgacctgagatcacgccactgcactccagcctggtgacagagagagactctgtctcaaaaaaaaaaaaaaaaagtgcctactcataccctcctcctatttattctgatttctgtgcatgtattctttttgtttgtttgtttttcagagacaaggtcttgctctgtcacctaggctggagtgcagtggcacagtggcatgaccatagctcactacagcctcaaactactcctgggctcaaaatgatccccctgcctcacctaccaagtagctgagactacaggcaaatgccaccatgcctagcctgtgcctgttttcttaaggcagaaatgatctaaaagtgtggcagagggaaaagaagatgggacttagagcttaaataaatctagatgaaaatgttggttctatcactcacaggttctgtgatgttagggaagttaagttatttgcaataaaaattattaatattgtagaacatgtattgatcctatgtatcaggcttgaattaggtgctttaagtgggttgtctcaattaattcatcactctgattttcaattttctgttctaagaaatgagatcaaatatgcctatcttgccgaagagtagtaaaaattagacaggtagctgcctctggatcctgcagggtagagaaagtattacatatctgcatgtgtggatgtgaaggacacacagatacataaggtaaatgagaatttattataaaggtgtatttgacaaaaattggggaaaaaaggaaaattggagaagatatctttctgtgagattaaagacaaataggggaaaaaagggaccaatgacaagaattagagcaaggtatgtaaagaattccagagctggctctaagagatagagcagctggtcatatatgaaagggatgattcattcttcaggggctatccctcgtgatcctatttccttgcacaagctatcagttaatttattgattcacctcctttatgtgctcataggcatcaagaatacaatggatcacatacaattacagaaaagtttcatttcaggaggtcaaacaggaagtttctttctgacttatattgaagtactcatgatgacaatggagaaaaatgaacataatcttttatgggtggggaccatgtgatctcttttctttcaagctccagagggtttataagacatttccatgttcaatttgattccggaaattatatgttgggtagaacagactctttttggcaactcatgagaattgccaatgatcccagcatttgctactcttgatagtaattcccttcatttcctccatttttatacatgacctgcagtaaatattgacagttactttgctggaaagaataacacagagacagcttttcttaagctccaaactgaatttcgtggttaattgattggccagctggccctgccgtctcttgacctctacaagagccagcaagattgatggtttcagcagcctttcatggtgcactaaagcattcagatctatcttttgttatttgggaaacactaagttcttatgtagcacattatttacatggactcaagggctgacgagctgggaggcagcaaatgcccaaatggaagacaatgtatgtagatcaaagaagccgatgagacagagagttcataaaatgtgaatacaattccaggggagaattgatgattatggaagcagaaagccaattgagttaaatattcattccagcaacaagtctgatcgtctcactgggacctgtgcctttccgaagtttcctcagcttttcaaggtctacacaaggaaagaacaaagccatcaaggaggctctcattctggaaagccggctgcaagatggcatgaaccagaggtcagcggccaccactgagagttcatcgtattcgcctctgtaaagaataagcctcaagcagtggttctgcaggagcggttcagcatcatcaataccaatgagccctaatgaatgtgacaattcagaatgattgggccttttcctccaaaacgtttttctcctcaaaagtaaaacaggcttgaaactcatgtcttatatatgctgtttagattttcatatattaatgtcacgaatcagatgataggaaggtatattaacaagtgagacattgggatatggccccttgttcaagagcatcaaagcattaaatatgttgttttaaaaatacctttggcatagttttaccacctatttctcaattgccatcaaaattttaacttttaatgacttttggaagtaggttagatggggtggtgggagaggaatagaggatacagaaagataaaaactaaatccaaaaatagtattgaatgagaattactaataagaattattaattgagtgtcttctcataaaaatagtaatatctgttctttggtctctcacaatacatagtttaactccatatataatttaatgaatgcaatgtgtcactttggttataggtttgcatcttggaaacgatgttagtagaaacaagtcagtttccctctgttcctttttgcttagctttctgggctatcttcaccaatgccacagtccatctgtaacagaatgcattggagatttgaaaaatcacgacagataataaatctctatatacttctcatcctctggaacaattgagacattgaaattgcctgatctttttgagtgagtgttgccactttgacccaggcaaatgagaaataaaacaacaataccaaccagcagtttcaagtatccttctgctgcataataactcagcagtaggctttgctaatggtgtttatgagctgccaggctagaattggcccttaagcagggaggcatttgcccagtgggcttcttccatgtgggggggcctttttgcagcctgggggcccttttaggtgattctcagccggagcggtctcttcaggccaaagacttttgcaatgagctaactatgttcaattattgctttcagatccaccctacattcaaatgttttgggacaccaatgtaataccataaaaatgactgtgtaggacacgcctatgctaatgtcatgactggtttgttttacgtattatttatttatttgatactgttaataaaaagcaaacaagccaaaaagaaatactccccaacgtttaatagagatcattgtatcctaaaatcttatagcacattagagtgcaatgaagctcaatgtaacaagcatcaacaatcaactacgaaatgagtatggaaatagagtatatccaaggaagacagaagtgtagaccacatgatgacagcgggataaagacaaaggagaaggtaatcgagagccaagggttaaaccattcaaattgtcctttggcattaaaatgatccaagatgtttcatgagttcaggttaaaaaaggaaatcagtaaaccccaatatactttaagtttcatttgacgcccacaagctgaaactacctctttgtggtgtgtgtctttacatcagcaaagagtataattgaatttggttattatctccagtgctacctgtttggacctgctatttcaccttcctgaaaactgttgcattgagttctactggggaaaattcttaagataacatctgtttactaagaagggggtgtgcttacctgctctaaggtattgaaatacattgtaaatctatacctaattcatataaacataatttcaaggaaaaacaaaaacataagagacagaccctggcggagtgccaaagaatttgtcagggtcccagtccctgtaccttatgggagaattaaattcattaaactgggccagatgtggtggctcacactggtaatctcagcactttgggaggctgaggcaggtggatcacctgaggtcaggagcttgagaccagcctggccaacatggtgaaaccccatctctactaaaaataaaaaaaattagtcaagcttggtggtaggtgcctgtaatcccagctagtcaggaggctgaggcaggagagtcgcttgaacctgggaggcagaggttgcagtgagccgagatcgtaccactgcactctagcctgggcgacagaatgagactcagtctccaaaaaataaataaataaattcattaaactgaacaaattgagcccaatttatttgtcatagttcaaagaaaaggagagagtagagtaaaggggcttagtgcaaatgtctggtcagatactcaaaggtttagagcctcttaacccttatatttctttacataatttattctcattattttttgtttgttttttgagacagagccctgctctgtcatcagtctggagtacagtggcgcgatctcagctcactgcaatccctgcctcctgggttcaagtgattcccctgcctcagcctcccgagtagctgggactacaggcatgcatcaccatgcccagctaattttttctattttggcagggatagggtttcaccaggttggccaggatggtctcaatctcctgaccttgtgatgtacccaccttggcctcccaaagcgctgggattacaggtgtgagccaccacgcccagcccattcttgtttcttggtaaaggaaaatccaactatatatatcttctttaggatcacttaaagacccatacagatctgtcaaatagacatccaatattttggtaggctttgaaaggaggtgcaaaaggatgagaaggaatttagggagatcattatctgaatcattgaacaaatgctccttaagcacctggtgaagagaggctactgagaagcagagcacgtggtcccagcctacgaggtgacaaagtaaaatggcagaagcaatttgtaatgatctcacctatatgtggaatctaaaaaaaagtcagcctcatggaaacagtagaaaggtgattaccaggtctgggggctaggagagagatagggaaggggaaatgctgtcaaaggatccaaagtttcagttagacagaaaaaataaacttcagtgatctattgcacagcatggtgaccacagttaaaaataatgtatggtacatctccaaattgcttaaaaaaaaaaaaaaggtttcaaatgttgtcaccacagaaaaacaaaaacaaaaacaaaaaaaacaaaaaaaacgaggcaaggtgatggagatgttaattagcttgatttaaccttcctacaatgtatatgtgttagtccgtttttgcgttgctgtaaagaagtatctgaggctaggtaatttgtaaagaaaagtggcttattttggctcatggttctgtagactataaaggtagcgtggtgctagcatctgcttttggtgagggctcagaaagcttccaatcatggcagaaggcaaagggggagcccacatatcagatggtgagagggagcaagagttgagggggaggtgccacgctcttttaaacaaccagatctcatatgaactcagagcaagaactcactcattatcgtgagaacaacaccacgctattcacaagggatccacccccatgaccaaaacacctcccactgggccccacttccaacactgcgggttacatttcaacatgagatttaaaaccatgtcagtatacatacatacattaaaatatgcatcacattgtgccctatacacatataaattattgtttgtcaattaaagaaagaaataattttaaaataaataggccaggcgcagtggctgatgcctataatccaagcactttgggaggccaaggcaggcagattccttgagcccaggagttcaagagcagcctgggcaacatgatgaaatctcatctctaaaaaaatacaaaaattagctgggtatgtggggggtgcacaggtagtcccagctactcaagaggctgaggtggggggattgcttgagcctggcaggcggaggttgcagtgagattgcaccactgcacaccagcctgggtaacccattgagaacctgtcttaataaataaataaataaataaacaaacaaataaaggttgtgttagaacaaaaaagaaaaagagtgacaatgcaagccacatagttgaagttgacattaactagcatgtgccaacgagtgacaaaggaaacaagtgcaaagcaagaaaagttagccattatcatggtccatagataatactctcaaccccggctcttgagtgaagcagtattgtgcagtggttacatttatggacctaatggtcaaactgcatgagttcaaatcccagctttacagctaatggttgcattatcttgggcaagtcatttaacatctctgccttaattgattcacctctaatatagagctgataggagtctgaaatagctgctataaggactaaatacattaatatatagatagcattcataacagtgttttgtggactttccgaaggtgctgggccttccagttgccttaaagaatggattggattagggtggaggagatgaaaaaaggcatcacagtacatcaagtgaatggtgccagtgtaagtagaatacaggaataaggaaatgcccagcttgttggggggttagtatgaagacctctaactgggactgaaagttctagcaacagtaaaataccctggcctccaactactaagtaccctgaatactaagatgagtttatttttcattctatagacaatttccatctctttctttcaaaacaaacaaatgatgacgctgtatgagtaacagaagatgactgggaacagaaccgtgaacagaattaagcacctgcaatcaaataaaattcacagaaaacttaatttaccacattagtgatatgcataatcgttgttgtgctggtaaccagctcttcaggaaaaaaaaaagaaaattcctgatttgttaaaatactgtcactatggcccactgaaactatcaaaatgaggcatataacaggaaattgggaggagagttatacaatcagctcttgctagaaaatgatgatcattgacattacccttatggaaccaatccaaatttgggggttgttttctttctttctacttttgtgtgtgtgtgtgtgtgtgtgtgtgttctctggtatctgtaaataacatccatatcagtttctccatccattctttgcacatcactggtaatgcctgagatcaaatctgccatgcttttccgggcagatccaggctgggatctcagtatccctgcttccctgaagctgtccaacctcactcccttcattgctctgctgtgattaggaaggagccattccaaggactatggggtgctctgtgggataagcccagtccttcttccatacaggaggaacaggggacgggtgctgacaagaggaaatgcatggagcagagagagggaacaggcagatggactcaaggtccccagactctttcgagtgttgaatcagaaggactggagctgtgggggaagagggtgggaacagggtagtggaataacatgcagacagatgggctgaactgaaggtccagaggcactcccagccgtcaaccagcagttcttacaccaggttgatgttagggaacaaccccagctttaaaacttatttataccaaagtgccaaatgactcatttgagacaaggctttgatctctggggacagggcgttagacagcatgaggcttaggttgccaggtgtcttcccacagttcctgtcttgtgtatgttacacactcaattcatgtcaggatgacactacattggcatgatccaagggaacccataactgacatgaatatgtgtgtgtgtgttgattggggagatgggaaagagaacatttcttccagattttctagttcttatagttcataatcttaatcctcatctccacttctctgccacttctctggctaaatccaaagcacagcctggctagagaggacttctcttccttgggggttctagtctattctctgagttgtgacaaacatttccattccctgtaattacccacttgccttgtctctgaagaggcattcacagaataaaccaaaagaattgtagtgttaggaagatgtcaaatcatttgacctctactccatctccggcttttccttctccccccatgaaagttatgcatttagttgcctcttgttcattagtctggacttagagcaaagtgactacttcaacttcttgtgctcaacatatgccacagttgcttacatgtgataagtccatttgtcacttgataagcctttgctagaatttccttctctccatctccaaccttataatgatcttgaaggcaatgtcggaggctaggtaagtcttctttgtgttccccacttgagcataggtgagctgtcatgtcaatttccttacactactgagaagaggggatgtgggtgggcagggacccccagaaacaactttacccctttcacagtttccatcactgcctccaatgtccaccgacgttagaaagtttgggcagaagtggccaggtgcggtggctcacgcctgtaatcccagcactttggggggccgaggcgggcagatcacaagctcaggagatcgagaccatcctggctaacatggtgaaaacccgtctctactaaaaatacaaaaattagccaggcgtggtgtcaggcgcctgcagtcccagctactagggaggctgaggcagaagaatggcatgaacccaggaggcggagcttgcagtgagccaagatcgcaccactgcactccagcctgggcgacagagcaagactccgtatcaaaaaaaaaaaaaagaaagtttgggcaaaacctagagtttcagggaaagtcatttgaggtttggtttaggcaggaaatagaacaaaaccagtgtactaaggagaatacagtggaaataagagggaaaggaatgaagaaactggtaggctactaaaatgcccaggtacaaactactgaacatccacctttatgctgtcagtgggcagaaaaagaaatagacaatgacaagatacattttgaattagtgtgatttaaggactggctgatgtgcacaaaacatgagagaagggagtcaactttgacagagatttcaagagcagatcactgatgaaatgtgataacattcagaaaatagagaagttgacatgggctttgatgaaaacacaatgagttcagtttgaagcattttgaagtcaaggtgattttgtgaaatacaaacgatgctgtccagcaggcatagaatctatctggagtcatttgtacaatatacctatgccttttttttttctttctcctactgtagacttagataggaactcacttttgtcttttttctgctaggccaataaatacgttctcagcttagaaaaggggctttttggtttgcctatttctgtttctttttacagaagttaacacatttatttgtgacctattaaaatcatgaagtattaccactgggttttatgttttaatggaaacatttcatgtttagagaataatgatgcttaaaatttatatgaattaaaattttagcctgtaaaaagagcctggaaatatcttcataccatcatctatccttccacttaaatattaatcacaaagaagatcaggcgtagtgaacatacaccacgcaacctcccattcagagaattcttgtgcaaagaaggattccaaagggtttcagaaatactaaacttcttgaaattgaaattgaaattgaaatccttcttggcttctctacctgttacttcctctgcagtgctcagtatagtgtctgctctccctcctttctttttctttttttttgagacagattttcactcttgttgcctaggctggagtgtaatggcgcaatcttggctcaccgcaacctctgcctcttgggttcaagcgatactcctgcctcagcctcccaaggagctgggattatagtaccacgcccagctaattttgtcttttcagtagagatggggtttctccatgttggtcaggctggtctccaactcctgacctctggtgatcctccctcctcggcctcccaaagtgctgggattactggcgtgagccacacacccggtctgctctccctcctttcttcacttttctgcttcctctctcatattaataataagcttctatctttccttaattgtttacatatctgtctgtcctctttctccaccccacgaactcctcaaaggcagagtccctgtcttttttatttcatatccctaatggtagctgcaaagcagacactcaagaaggaaggaaggaagtaggtgggagaaaggaagaagaaaggaaaatgaaattaactactagtttgtttccctgtttcattgagaacacacgtattaaccaaacaagtaaacaattgtcagaatattgcattttaaactcctgagagaagttgctgcttctgtggcatttctatctaattaagtttccccttaaagttgtaatcttttctttcaaatctcataatacgtcttatttaggtgatcataccaattatatctttcccactcaaacccctaaagttatccttgaataaatgagccttgcaaattatatttccccaatttgcacttatttctttcttttttttcttttttctttgagacagagtttcactcttattgcccaggttggagtgcaatggagtgatctcagctcactgcaacctccgcctcctgggtttaagcaattctcctgcctcagcctcccaagtagctgggattacaggcgctccccccctccccatgcctggctaattttttatatttttagtagacagggttttgccgtgttggccaggctggtctcaaactcctgacctcaagggatctgcccacttcggcctcccaaagtgctgggattacagatgtgagccaccgcacccagcctcagaatttcttactgaataatccttttatagtttgttataactaacacaaaacagtagtgggagttcttattcagatagctaacaaattccaggcacctcctgtactataagtgtccctcatagcacaaaggggaaagctgccctttaagaatccataaatgcaatgaaactctacttacgccacccaggttgttaggacacaggaatattaatctggagaagcctttgataatagaatatagtcaaagttgacattgtgctagaatatttgaattttttattttccagaaattattttcactctttgctacatttactgtttgacctcaaaagaatgtaaaagcaagtttttaaatacaccattatttcctcaagaggctacagaattgctggatttttttttttttttggaatggagtcttgctctgccacccaggctggagtgcagtggcatgaccttggcacactgcaacctccacctcctgggttcaagcagttctcttacctcagcctcctgagtagctgagattacaggtgtgtgctcccatgcctggctaatttttgtatttttagtagaggtggggtttcgccatgttggccaggctggtctcaaattcctgacctcaagcaattcacttgccacagcctcccaaagtgctgggactacatgtgtgagccactgtgcccaacccagaattgctggaacttaatgccaactctcaattgtctttccttctgctagatctagttaatagcaggtgtctgatacatgttactgaagtgaatatgaaaaatccagagtaagcaaataaatcatatttttttaattaaaaacatataaagtacatttttgtcaaatgaacctaattggcaaagcaaaatctcatcttttaaatttctgagtttccactattgataaaaaaaaaaaaaataacgtaaaacagtgttggattttcaaactcaaaagaaagaaaaaaaccacaaaaaacaaaaaaagcagaagttgggtaaaaacgagttctgactaaaagctgcaatactgtctcaaatgtgcccatgaccccacctattgctcaatttctacaccatgagggtaaagggaaacgaaatgcaacttggattcacttgacttcttaagtcttacagagagagaaactgatcagaaaagatacatttttggaggttggtttttttttttaattcttgcttgtaaggcagggcttggtgactcctggtctcctccaatagcctaattttcctcccaaaagtaagcttttgattccactagggtgggcaagtatctttgtactctgccatttcagagataagagccaactgattttagaaatccaagagcaaatgaaatgtgcaacattttactcttggattgcttgagaccgcatctgtatgcctattccctggagtgcagactgtcttgtgagcatttggtgccactgaactctgaaaatcagggcatgcagcatctgctggggaacacaatctggtttctgtggatcagaagcatttctctacacgttagagtcttaaggatttttaaagagagcaggtctactcaggcaactcgttaccgtccctttcaaccggagtcagaactaagaatgctcagcagatggttgtggagtgaggtaaatttacatgcagccttcagtcattagtgacagatctattttaaagggacgaggttgtgcaacaagggtacaaaggcagctcatggttctaattgttgggctccattagaaggggtctttctggagactgtggtttcttagagcaccgcagtctacccctgaatgaaaggcatcctgctggctaattaacttgcagcactttcttctctattgtgccttgattttttgttttgtttggttttaatctcagaccttgtttctagtaggactgatggagtcttccattatttcgcctaaatattttatgaagaacagagtttccaatcactcactcactctgatttcattacttttagcatacttttcgttcttataatctgcaataaagaggaagactattaagattcaagcttgtttgagcaagtacactgccagagcaaaatcagaggaattcatggaagactgggaaggtgcaagtaatctttctcttagaattgtgatggtaacatatgaaataaaatgtgggagcaaatgaagccattgaaaagagaggccattatacttctgaccacttgggaaataccccccaaaatagctgaaaggtcccaagaggctgggcacagtggctcacatctgtaatcctagcactttgagaggccaaggcaggcagatcacttgagcccaggagtcagagaccagcttgggcaacatggcaaaaccccatctctacccaaacaaacaaacaaacaaacaaacaaactagccaggcatggtggcaactgcttgtagtctagctacagcttccatgaattgttcagtgatgctctcttaactccatgatctatggaacaggcaggcagaaatggagagacagtgggtggaggggaggagcctcagatggcacagaaatctgtagcatctagatcagagtgacacctcagagtttcgagtaacgacaggcacctggcccatggctgggattgttaccagtggtgaatctgtgcaggtctgcagcaacctcaattcttccctctttaggataaaaacttcattgaggggcataaagcagaagagactgaagcaagttttagagagggagtgaaagtttattaaaaagctttagagcaggaatgaaaagaaagtaaaatacacttggaagagggccaagcagacatcttggaggtcaagcacagggatttgaccttctgacttgggggtgtatatgctggcctatttccagcacttcacatcccttttcccttgattcttcctttaggatgggctgccgcatgtgtggtggcctgctagtgcttgggaagtgagcatgcgcagtgtgtttactggcgttgtacacatgctcacctgaggcgttcttcgggtgaatgcccccagaaagtcatgtaccagttaaactctgccatttggcctcttagtgcatatgtgtgagccccctgcccaactcctgggaccttatcgggaagctgataatcaccagtttcagatttttcctatttataaaaagactgcctttccctggagctggctgcaaccaattattttagagagacagttaccaaccacctgttcatcacttgatggtggcctgacattcctggttagggcggggggcactgtcctgctctgctcatgtctgcctacctactgtagcaggaccacaggcagacttttcttaaggagactcccagctttcttcctggtgaaggacccagagtttgtgagcccaggactgcagataatcaaaaatattaaattatggaagctaaatatttaaaataataactcataatggctctccaaatgtctgtaaaagcatttcacttaacaatagctggcaaatattatgtcagtggaaaatacagccaagttttggctcatccaaaatgttgtcatcaccgccactttaatatttaagagattaatgtttcaaggctcttccagaacattgtatttggagtctgattgaaagactcctcggtcctccctcattattctttatgtgtgactttggatgctctcaatacacttaaattgtatgtccctgtggggaatggttctcaaagtgtagtatctggagcagcagtatcagcttcacctgggaacttgttaaaaacataaattcttgcagctggatgtggtggcacatgcctataatcccaatgggagaccaaggtaggaggatatcttgagcttaggagtttgagactagcctgagcaacatagtgagaccccatctctataaaaaataaacaaaattagctggacacagtggtgtatgcctgtagttctagctacaggggagtctgaggtaggaggattgcttgaacccaggagttcaaggctgcagtgaactgatatcgcgccactgcactccagtctgagtgacagaacgagactctgtctcaaaaaaaaaaaaactgggggccacacaacagacatactgaatcagaagcctgggggtgtagctcagcttgtattttaacaaggcctccatgcaattctgatgtgccctccagttttagaattgatgctctgtgcaaatgaacaggtactggggcataatgatatgcaggactgttcttgagccaggctttgtattcatgaagtgggtgatagttgattggcattgtttcagtactcagtagctatgaagcattctattggtatcattggtattaaatatggagcagaagcataactcatctccctcatggccacatgaagaaagatcagtatgttagagctgaaggacacctaaagccccaaacaactgccagagaccaaaatcatttgtctcaagaaatgttaacaccctttttgtgttcaagttttattatttctttactaaaattgcccattcacccctttgttttatttttcacacctaaaaaagtagccaagtttgaaaaagaaagagtgcttgccaccctttctgtccttaaagtgaaggccttgtctatctcattctgatctctgcccatccatcaccattcagcactcctgttgtgacttcgccccatctccaatcttacattttattttcttggtacttttggtcatggctgtgttgatggtttcagaagaatacatagtatattaaggggtaacgtttacaaatgttcttgagagaactaatttttcccccttcatctcaaggtgtcactgcttaattattacggttcctaaataatctctatgatgtggttaactatccctaccttgcagaaatcctggaagatgagacggacctagcatgttgtgtgagcaacatctcttagagataatcaatttgatatcagcacaattattgtggctactattgaaatttctcttagtttcttagattagtactattggaactaatcgtaaataaccaatttacaagaaaatgagtctcattatattatagcacgaagaggatatattcaaggagatacacctttgaatctattatttcaatatgcttataaaaattactattttaataaatttcccagtcaatcctattgtgtagaaaaagatgcttcactgcttacatattttaagatgagactgggaacaagcagattaatttggttgtgagactgggagtttatgagcaaaatgttcttctgtgcaaacgaagtagaagcttcatttcccttcccttcagttaaccctatgttattggatacgtaccaggtactagagattctctccctgggtagtctggcttagaatggctccccaggctctagccatctgcatagctgctagaggaaaaagctgttttagttggctccaagaatgtctctgggaattataatgtattcatagaaatgagtgtggagtgcccacttgcacaatggaagatccacaataatacacctggatctgatagcaccttcctgaacttgggccacttccctctttgaggtttgtgaggccaaagggatatacacagaggctgcctttgtttgtgattacctgggaattagatggggtatcattcccccttatatccttttactatagcttgttcacttttgaaaaggtggaaaactagactaaattctgtattgaaaatgtcaagtcaaatatgctatataaccaagaaatatcagtatagaatatcatgtattctacacaaagctacattttcaatataatccccgtaattatttcactcatcaaagaaatgtatccagctgagacataaaaccttagtcaatacattaagaaaaaaagaaaaaaaaaaacatttttttcccagtcatggggaccagattgtgtctattattcatcagggcctagcacaatgttgagcacatgctcaaggtggccaataaatccttgtggaattgagttatatgggagtcaattattcggtcacagcactggattaggaggttgagttcttgatagatttactttcagctgacctgtgtgacatttggtatttggttttgcaactttgttttcagttttttccatgcaccaatactcctagaattttgcttttgcctcttttcttccctttcatcttttttttttttctgtagaaagcatacatccatatagaagacctctctcaatacattccagatctgagttgcagtgcagcacttagcttagcttgtgaaacactccaaagacttgattaatatcatcctatggagagatgtccttaagtaacttagaatggatcctttatttttccagtaaataaactctaaaatatgaggatttccaaggtgaaaagaaagagtacgaacccaagaaatattttaaatgaatcttgttttccgtccctgtgttctgagtaacatctgtattcacccctgcctttccattgattggaaacctttagtattctttgtactctcacagtcctagtttctcagaactgtctgtcccagtctaggcagttgtttcattaaacaaatgttattaaacaaataattttgagtgtgtgtctggtggggaggggaggctggggggttaaattcatgtatttttaggcaagagtattaacaagaattgtttgaaatatttctgaaaccatagtgtcataatgaaaataaaaataaggtggagactggattgtaattaacacagagcttttccatccaagacagagcttaaaggcctctgtttgttgggtcactttaaaaacaaaccctactgccagggatttccaatggcaactttaccgtgcttacccaaatggaggtaattaacaacccttctgtgtgttaaattaggtatccacagaattgggaagcttcagatatttattgtaaaccagagcctcttttcttgttaatctcctaagacagcagactagtgactcgcacccattagaacaaatgaactaagaaactgaatgacaggttctgaggcccctaagaagaaaaaacagagtctggattagagctgcttaacagaccactcactggggcatgctccctccccacgcccatttcctatcccagaaaataacaaacttcagatgacccgccaaaaacgactaccttttatatttgtcgttgaattatttcttctttgtttaaaattaaataatgcaagtgatttttttgctttagaaaggaggattacctcttcctagacatccagttgaaaaaccaactggtatagaagggaaatgcatctcaaacagatacaatgacattcttataattgcctcatttgaaatggcagcatttccccgtgctaattgtcatccttcagctaatttggtacattaaaggagattgttattaaaaacaaaattaaatccattgccagcatctttattctctaccagaagaaaaattttaaataaatgcaaatacgccagttttgctcttaatgttgcctgaagttgaaaggatgaactttgacttgaaagataatgagttccccctgttggaggatttgaggtttgggttggataatcccagatgatgttggaatagacagaatttaaggttccttctaaccctgaaattctatggttataaaatctatccttttcttgaaagaagaaatattaaaggtgttttcaaggaaatggtagcataatgaaaaaggaaacacaaaaatgatttttttttccttaataagcagtcacctcacttggtaatagtttttcttcttaattgcttgtttgtttgtaacaaatgcggtggtgtaatcaagtggcttttacaataataaaacacttctctcaattaaactgtactgcaaggaattcaaagatgaacagaagtgttccttcttttaagatgctgatttataagcatccctttaaaatttacttctctttctgatgataaaagtaatacatgtttattgtagaacatttggaaactaccagggactataaataacccatagttgccccaccagagaatattcttaatatttttggcatatttcttccatatatctattcatattcacattcatactaatttgtcatattctaatttaaccctctctttaatgtttataatgtgattatactactttttaacacatgaattgtctccaaataaaagccaaagtgatccatttgttaattttttttaatcctacccagctgaaatggacaaagaggagcccatctcactcgggggaggggatcaaagagttatcctttctcttgatcaattctgtagcaatcagccatgataagaagcccaaattaccaaattaacaaaaagaattttatttagtggccatatataaaagctaaatggacagttggagacagacaacaaaaactaatataaaactaaaaatgtgaaaattcagcatttaatgaaaatgagagcttagaaaaactagcatccagatttattcagactgaatttctgccctgggaaattaatgaatcatccttcagttcccttttgtgtctgtgcatccagcctcattgtccttggtagtaaattatgtacaccccctgtttccaaatcttcaaatacggtatgcgtcataaagtcacaaaatgtgtaatttgggtcctgtatacaaattctagccagggaatggcttgtagtcatgctaaatattctttacaagttgtgtaacaaagacaaagaaaactacaaaaaaatacagagaaacataaaaaatttcccattccttctgtgattctgatgtatttccctttgattctttgcttctacattgaaatagacttagtgggtaatactaataattacagttaacagtgaccaggtgatatggtttgactaggtccccacccaaaatctcatcttgaactgtagctcccataattcgcacgtcatgggagggatcccgtcggaggtaattgaatcatgggggaaggtctttcctgtactgttcttgtgatagtcaataagtctcacgagatctggtggttttataaaggggagttcccctgcacatgctgtcttgcctgccaccatgtaagacgtgactttgttcctcttttgccttccaccatgattgtgaggcttccccagccatgtggaactgtgagtccattaaacctctttctttataaattactcagtcttgggtatgtctttgttgttgttgttgttttgagacagagtttcactcttgttgcccaggctgaagtgcagtggtgtgatctcggctcactgaaacctctgcctcccaggttgaagggattctcctgcctcaccctcccgagcagctgggattacaggcgctcgccaccacgcccagctaatttttatatttttagtagagatggggtttcgccacgttggccaggctggtctcgaaccctgacttcaggtgatccacccgcttcagcctcccaaagtgttgggattacaggagtgagccactgtgcccagcctgtttggttttgtttttgttattgtttgtttgtttggagtatgtctttattagcagtgtgagaacaaactaatacatcagaagttctgattttcatatcagcacagagaaaagtgaccttcccagtccagtctatcgtattctcaaattactttctctaacttgtgaaataagatcttcttggtgaactttatcagacatttctgaacagaattaccactctgtggtggcctgggtaaatgtaatatatttataataatttgaaaagattcctccaggacttttacaaagacagatgatattaaactgaacaaatagtgctaggtaagaagtaaattgttcaattttttcacagaagccctgtagattttagcaaaaccccccagacacaatgtcaaatttctcagcaggtttcttggttttagctcttccccttaagcagtagttaacagaatattagatgttagtaaagttatttctttgttattctacctgggttgactaccagagaaaatccctgaacattttacaaattgctcaacagattttcatctaaaactagaaaagattggccagttatggtggctcacgcaggaacattgctttagcccaggagctgaaaaccagcctgggcaatagagtgggacccccatttctaaaaaataatatcttttaaaaaattaactgggcatggcggtgcgtgcctgtagtctcacctacttgggaaactaaggagggaggattgcttaagcccaggatgtcaagattgcggtgagctatgattgagccactgcactccagcctggaggacagagtaagaccctgtctcaaaataaaataaaataaaattagaaaggataggtgtgtttgggagggagactggttaaccagggtgcatgggattatgtagggcttgtctttcatttgagttcttctctgtctttttaaaatgactgattatatatattaggtcccaatggcttcattatcactattattttaattcataggttaaattttataaacatgaaaaataattgacaagcctagaatctcttttctgtctatattagaaattaaattatatttagtatttaagcaatacatgcatacatctcatgtaatccttactgtaattaaggatgaaattatgtaacataggaaaagcagatgtaagttctcattctccttttacacataaggaaattaattcagacttttagtaagttgcccagaatcacgcagctagtaagattcagaactaaaaatataatacctgtcttctaattcaaatgtttcacatccaagtgcccatatactaataatttttaactcttttgttggggttaaatgagataaaattgagtcttattgtatagaatttatcagaaatagcaaaatttcgcccaggcacggtggctcacgcctgtaatcccagaactttgggaggccgaggcaggtggatcatctgaggtcaggagttcgagaccagcctggccaacatggtgaaaacccgtctctgctaaaaatacaaaaattagctgggcatggtggcaggcacctgtaatcccagctacttgggaggctgaggcaggagaatcacttgaacctgggaggcgggggttgcagtgagccaagactgtgtcattgcactccagcctgggcgacagagagagattttgtatcaaaaaaaaaaaaaaaaaaggaaaatctctaaaatgatacctaaaatgataaacaatttaaatttagcataattatcattttttaacttacagattgacatatttctgcaagtgttttcagaggcattggggccacagaagtccaagtcaaggcaatttttggtactaaacagttgacttttctctggtccacatcaaagctgccactgtgcagagaactaacatgtgtacgtgactagtctagggctggaggaacatgcgaggggactgttggaaaggaaaaacttttgctcttcctctaggttcagtaaattagggactgtaaacaataataatgaaagattaataagaggcacacaattttattttattttattttatttacttatttttttgagacagagtttcactcttgttgcccaagctggggtgcaatggcacgatctcggctcaccacaacctccccttcccgggttcaagtgattctcctgtctcagcctaccaagtagctgggattacagacatgcatgaccatgcccggctaattttgtagttttagtagagactgggtttctccatgttggtcagcctagtctcgaactcctgacctcaggtcatccactcacctcggcctcccaaagtactgggattacaggtgtgagccactgtgcccggccccacaattttattaatatttatatgcaaaagagcttgtagaaaatcagtgaaaatcaaagaagtggttagactagggggtttataaacccttcttaaccaaggaaagagggtttgggcatcaatgagtggcgaattgtggagaagtgactagaaaatgtatgagagaaactaatggaaggtatattagttcattctcaagctgctataaggacatgcccaagactgggtaatttataaatgaaaaaggtttgactcacagttctgcagggcgtggaggcctcaggaaacttacaatcatggcagaaggagaagcaaacacatccttcttcacatggcggctgcaaggagaagtgctgagcaaaaaggggaaaagccccttataaaaccatcagatcctgtgagaactcactcactatcgtgagaactcacttactatcatgagaacagcatgagggtaacagcccccatcgttcaattacctccgaccaggtcccttccatgacacatggggattatggggactacaattcaagatgagatttgggtggggacacagccaaaccatatcagaaggtaaggcctattttagtaagttttgtttatgcaaactcatctcagtgttgactccctatctttataacatgggtcacttttttcttcctgatggtgtgggggagagggcacctatctcaaagagaaattttgctctgcttttagatgtacaagggaaagacagagaactgttcctgcatccattgattatcaattgccttcagctcaaaataatccttatgccaaagtagcatattttggggtggcatatttcaacctccttcatctctacccagctggaactgtccagggagttgcatacctcaaaagctgagttggtggctataaagacaagatttgggttagttcctgagaggtaagagacctgcaaagggaaagaacatagatcagaacgagaataaataagcagaaaagagcaaatctcagcacattcccactgatctcactaaaccaggctcctagtactggaaataggtcagtcaacttcaacaattgtatctcatttcaggaagcagcatgcaggtgggagtggggcacccctctgaagtttggcctttatgctatgtgaataatcacacacttaaagagaggcatttctatgaaaacaaaagaaaaacaaagattaacagttggagcagactctaaagccagtttttgagtccagaaggcagttagttggcaagatttctaaatgttggattcaaggctgggtgcggtagctgacatctataatcccaacattttgggaggctcaagtgggagaattgctcgaggccaggagttcaagataaacccgggcaacacagtgtgactccatctctaataaagtcatccaaatgtagttgtatgcacctgtggtaccaactactcaggaggctgaggtggacggattgcttgagcccaggaggtctaggctgcagtgagccatgatcacaccactgccctccagcctgggcgacagagtgagatcctgtcttaaaaataaataaataaataaataaatgttggatgaagtgtctttagatggtggattgaggataacaggggcagtctcagtcacgtgcatttcccggagtttgaaggaacatgttctggtgagcttcctgagtggtccaaactacggtagtgataattcctttgaagttaggttcagttgtccaacttcagcttccagggctccaagaaaagggcaattgtggttctcagtgatgccaagtcacaagggtgagagaagactggaaacattaattacaagatggcaggattcagtttataaaggggggaaatatctcaatgataatgaacattcacaagggtgggttatagttttccattaaaacataaaatttctttctacaatcacccccaatgtgatcaaaaacaatcaaagtatgtctgcttgtgtctggcaactgagtctagtctcattaaacttggccagattatttacataataagtgcagcaagaatagtaatttagcacgtaggcttttttgtgtttgctcttctggaacttttaataaggactctcagaatagacttttaaaagctcttgagagtagtaagccaagccaagaactagccattagactttatctgtaatacctatagattggggtgaatttcccttttcttgaggactctaaaacattctgagtttcccgggcctgccagaaagttaccttccttacccacctgtaaggctaggaacgctataaaccagatacgagtcttacttttccaagggagctttgtaagcgttggtgccatatagtcaaccttagttccttaaaactattgggttatatgtgattccacacacattattttcaaacatgacactgcagtcaaagccttagtaggacagccaatgtttccaattgtgttctgttccaaggagaatagattcttatggaacttaggcaaataactatattgccatgaaaattgaaatactcaataagcatttctgaattttggagagatcaggtaggggcaaaagataaatatttcatttttgtttatgaagacataatctattaaattattgtgaattacaggtagcttttagaaagggtttcctgacatccagaagatagaacattaaataaccagcaaggtttcaatcaaaaaggccataaaaattataattgttttttatcagttcattcagtcccatgtaattaattcttgttttgcttgatcttagattagtggatttatgaatccatcagcttctccattagttctggaaatccttactgtgtccagtgttataatcttgaagttatttaagcaatgtcagcagaagcctgtactccagagtacctgccaaggttttgttcatgaatctctaatatgctctttctttgctgaagatgaggcatgctggcctacagctgactgcgtgagccttcagaaaagcatcggcataaaacaataattatctgtgaatgacaatgacttaaaatggccatacctaaagatctgatgaaagttcattataagtcaattgataaagaaatttggttgtttctctgacatacaggattttaagataataatgtgataccaagacatctcatgaacagcaagggcattgacagatttctaggaattttatatgatttctgaaaaatcaaaatcattatatccatacaaatataacccaggaatggttaaatatcttctctttatttgacagtgcttcccatgcaatttagcatattaaataagctcatctctctttttacaaactgagagaacaaatcctttgagagttttccaggggccctctgggaaattccagagtcaattcaaggtcaagaagacttcatttggaatttgatttagggaagttgtgaaaaacgtgaaaaggtttgaacaattgattaaatgggatcacagatcactataaaacaatacttagttatctatttaaccaaagtgacaataaaagattttcaagataaatatggaagataacataatcataaaaaattttaactctttcaatcttaagaaaacttggttttctgaaataatcaaagacataataagtgcaacataaagcacagaatatttattttctaggtgtatcactcaagaggtaaagaaaacatttcataatctcttaccaagaatagactactcggtatagtggctgaggcctgtaattccagtcctttaggaggctaaggtgggaggattgcttgaggccaggagttcaagaccagcctaggcaatatagtgagaccctgtctctctaagaacaaaaaatagattaataaaccaagaaaacttgctcattttaaaagtagttttgcatcaatacactactgtattagtccattcttgcattgctgtaaagaaatacctgagattgggtaatttacaaagaaaagaggttgactcacagctctgtaggctatacaagaagcatagcagcttctgcttcttgggaggcatcgggaagcctccaatcatggcagaaggtgaaggtggagtaggcgtcttacatggcaggagcaggagcaacagagggtaaggggtcaggtgccacacaattttaaatgaccagatcttacgagaactcggtcactatcatgagtacagtaccaagagggatggtgctaaaacgttcttgagaaatctgcccccatgattacaatcacctcccaccagagcccacctccaacactggggattacatttcaacatgtgatttggtggggacacacatttaacccatatcaactactaagctcattctttaaaaccttataaatacacccattcagtcctagccagcgtggccacacaatgtaagattctctctctcttctgttctctctctctctctttcactgacctttacaactttctatatcaactcacatttttgtcctttattttcgtctttcttatttaaatgacctctaaactactctaggataaaagtcactgtcatttttctttaacaaaaacacatctcactctccttgtactctttgcctgcagagttttgtttcttcatcctattattactagtagttcatttacacatatttattagatttcttaacccttagtaacattaactttcagtgaaaatgaagaaataaacaatcataaactgtcagttacatacatgcattctgtgctacattagcacaggtataaatacattctctcataatttctagaggcatgtttcctaacagtacaacttctcagtgtggcaaaagagcaggtttattaacagatccaaatacctttagtctctgccaaattaagaagtcaaaagtagccgggcgcagtggctcacgcctgtaatcccagcacttcgggaggctgagatgggcggatcatgaggtcaggagatggagaccatcctggctaacacaatgaaaccccatctctactaaaaatacaaaaaaaattagctgggcatggtggcgggcgcctgtagtcccagctactcaggaggctgaggcagaagaatggcgtgaaccagggaggcggagcttgcagtaagccgagatggtgccactgcactccagcctgggctacagagcgagactctgtctcagaaaaaaaaaaaaaaaaaaaaaaaaaaaaggaaataaacttaaatagataaactttagtaattagtattttggtattttattttctttgaaattatctacctatttcatgaatatccgtcatttaacttagtataactttaagatttcaagtaaccaaaaagatgtcggaaactatttttaagtcactgtactataaaacagttattgttgaaataaagtttgtcagagtaatgactcaatctgaataaaatgccatctataagtttaatagccttaaacctcagtagttataatgttagtttgactagtaagtccaagtagaataaaatgtatatttcatgttgacaacttgaagacgtaactctctttaattaaagaaataatattaaactggtagtagcggtgaatccatacgggtatgcagcatccttacatcttgcctccttagaagaaagagttcagctgacggacatacgcagagtgagagaccgaggcaagttttagagcaggaatgaaaggaagtaaagtggaagatggccaagcaggcgacttgagagatcaggtgcaccgtttgaccttctgacttggggttttatacgctggcatgcttctggggtcttgcattccttctcgcctgattctttccttggggtgggctgtccacatgctcagtggcttgccagcacttcaaagggtccgcatgcacagtgtgtttactggacgtgtacgcatgcccacttgaggtattttttcccttagcaaatccagtgttcctagaggaaggtcatccgccattttgccttttagtgccatgcttgagcccacttacccaactcctgcgatcttagccggaagctgctgatcagcagtttcaggctcttcctatctgttgggagcctgcctttccctggtgccagctgcaaccaattattattttagagagacagttaaggactgcctgtccatcacctgatggtcgtctgacattcctggttgtggggaaagggaaccctctcctgccctgctcatgtctgactagctacctgctgtaacaaaactagttttatttaccaaagattatcttatatcagataaacttgaaaacatgttggttatatttaaccattaaataatatatttggttatatttctgagtgttttagcaatacttataagcgtttttttaagccaacttagaatagaactcatttattaatttggtaataccatcatgaagtgaggaaatgtcacataggtacaacgtacatacatatatacacacataaacatataaagatttatttattttaaaatttaatttatttaaagacagaaacagatagagattattttaagattttagccacaggtcaggtataaatatagaaacacaaaactcacaaatttatatgagctggcatttttgtctttttaaaaaaatctgaattgtatttctggcagatggaacaagaggttacctgctcaatgagggttaaggctttttatcaatattgttggtggagacttaaaaaatttttttcttgacataataatttaatgtagacagtagcattagtctcaggttattgttttagtcaacagaaattaaagccaggtgacttttgggctggaaatcaaagttattaatatttccttaggtgtttacatatcaaagagatggccctcaggtccttgagaagacagttttgggtggtagaatattttacagctgaaggaggaagagaaaggatgtaaactttcaagtagtccctttaaaagggagttttcgggcatttttgtctgttacagggttgctgcgtatcattgttgttattatcaattgttattttctgggacaaacagtaaattcttctggtagcactaagctttatcaagcaggcattttaaaagtggggttggggggatgatttttgatgggtgtgaattttaagttcttgtctaaatctaatttatgcttgttaattttgttaagggagctatccagtctaaccatgatacacttgtttccttctttcaacttgatcctcccataggtagcaatacgatgtttatttagggtgagagctctctaaatatccttttaaacataaaagctttttcaaatcccagttccatcatctggtctttgacaatttaggatctccaaaggtatacgtgctccaaaatgtgacacaaaaccagtaagacttttatgactcaaaaccaatcatccattttatggtttaaccggggaccaagagttgtccccagagagggtgcagaagactctgccctcatgatggaaagtcattcccaaaaatagccaaagagaaagcgagctgagaccctcatggtcacaggcagcaaaaatggtgtttgtgaaaatggtatctccagcgttacacaaaagtgaggcacctgcaatcacagacttgtggacctgtgacacttgggaggcaatacggagatgggactttttcagcactaataagacaatgaggaaggacaacaagtgccttgtatgagctgagacactttatttagacaaattccccagattgctgacatagccaggtgggaaattttgctagtgttttttagggtccttgactgacagcgagcacctccagactcaggcccaaccacctgtgcttcccagtgggcaaaaacacagacagaggtgaggcgtggtggctcaagcctataatcccagcactttgggaggctgaggcaggaggatcacttgaggccaggagttggagaccatactgggcaagatagcaagaccctgtctctaaaaaaaatttaaaaattacctggacatggtggtgtacatctgtagtctcagctacatgaaggctgaggcaggatgattgtttgaccctgggagtttgaagttacagtagctatggtcgcaacactgcgctccagcctgggcaagaccttgtctctttaaaaaagaaagaaagaaaaaacaaaacaaaacaaacagagcatgctgttactagatctaagtcaagttctcgggacagaagggaggacttcatcgaatttcttttttattggggacccacaacaacatttgcccaaagggtctgtagtctgctgagaactttaaagtcaccagtctgtgaggctggctcaaacaacaggcttatacacctgtgccaatattctattctatgattttcctccttatgacaaacaacacaaaagacagagacaaagagaaaacaatggctgtctccaggaggaaaaggattaatcacaaaagtcctcaagccaaaaatcacaaaagtcgcaatacccaaagaattatttcttacaaatgttttctcctgccaatctaaatttggagaggaaaagacaaggaaatgctcatactgcactccctcaaccaggctctctgcagaaatcttggggggtatgtggggggatctttttgactgggcatggtggctcacacctgtaatcccagcactttgggaggctgatgcgggaggatcacttgagtccagaagttcgaggctgcaatgagctgtgattgcaccaccgcactctagcctgggcaacagagtgagaccctgcctctaaaaaaaataagataaaaaaagcagtttttcaagggtgtacaatctcctacagcattctatctattctttgattaattaccctcaacccatttagccattaatttattgaacaatgtattagacatccacttcgttccaaagactctactttagggttgaaaaaaacctaggggtgaacctggcatggtttttgccctcaaaattcttaccctatgatgggagagagggaagatatgttcatgattaagctctaagtcagaatggtgaaaaaaatcctttatagaagtacaaagatggagcatgcctcttactaaatagttgtaagagcgagcaagagttactaaagcacttcaggttaaggggaggcagagggtaaggcaggttagtgatagggtacttgtaaaatctccaaagcatgaaaaattttctaatgttttgaagtagcagaatataaagtttgtaggagacaatgtccaaagaagagactgaaatggtagtttgaagccagtctgtgaatccattgaatggaacacttcacagtttagttgcctcttcttgattacagagacttacagaggcatttcaactggaaagtgtttgatctgctttgttcatttgaggaaacaactttgctggctgtgaaaaatgataaacagcatgagggagaatttgctggcaaaaaacaaaacaacaacaaaaaaactaagtttataatgcaacagtcccattaaagagtaacatgaggtgcccttatatacttttagtggcaatgtataacatttggaagtaacttggtagtacttattaatcctttgcaaatctttgcccaaatgagtgacagggtctcactctgttgcccaggctggagtgcagtggcatgaccttggcttactgcaacctccacctcccaggttcaagcaattctcatgcctcagcctcccaagtagctgggattacaggcatgtaattacatgcctggctaatttttgtatttttagtagagatggggtttcaccatgttggccaggcttgtctcaaactcctgacctcaagtgatccacccaccttggtctcccaaagtgttgggattacaggcatgagccaccgtacccagactacaaaaatgtatttatggggatgttcaatgcagtagcagctcatatgtccattcatagaagatgggttaaactctgacgtagctaaaccagctaacacttttcaaccattaacaaagaatggtagagtggaatgtggtggcacatgcctatagtcctaactactcaggaagctgaggtaggaggactccttaagcccaggagtttgaggtcaacctgggcaatatacaatatagtgaggccctgtagagatctataatatgttctgctgtaaacataagtccacaatataagggccatttttttttttttgagacagagtttcacactgtcgcccgggctggagtgtagtggtgcgatcgctgctcactgcaacctccacctcccaggttcaagcaattctcctgcctcagcctcccgagtagctgggattacaggtacctgccaccatacccagctagtttttttttttttgtatttttagtagagacagggtttcactatgttggccaggctggtcttgaatgcctgacctcgtgatccacctgcctcagcctcccaaagttctgggattacaggcgtgagccaccgcgcctggcctaagggctattttttaagttgcaaaacaaaaacaaagttttaacagttgtcattctgatatgtagaattattaggaaacctacactatttattttttatacttgtatatactttgtggttttgttgttgttttggttttttgtttgtttgtttgtgtgagacagagtctcactccgtcactcaggctggagtgcagtggggcaatcttgggtcactgcaacctctacctcccaggttcaagcaattctcaggcctcagcttcctgagtagctggactataggcacacaccaccatgcccaaataatttttatattcttagtagagatggagtctcaccatgttggcaacgctagtctcgaactcctgacctcaaacgatttacccacttcagcctcccaaagtgctgggatcacaggtatgagccaccgtgcctggcctatacttgtgtatactttgaattgtttcttttttcttttcctattttattttattttattttatattttattttattttattttttgcgacagggtctggctctgtcacccaggctggagtacagtggtgcaatcatgactcactgcagcctcaagctcctgtgctcaggtgatcagcctcctaggtagctgggactacaggtgaccaccatcacacccagctaatttttgtattttttcatagagatgaggtttcaccatgttgcccaggctggtctcaaattcccaggctcaaatgaacctcccacctgggcctcccaaagtgctgggattacaggtgtgagtcaccacatccggcctgaattgtttctattattcacatataactttgtaatcttaaaaaaaatacttaagactttaaaacaaagatgattagagcctggattaagctagtgtcggcagcctgaggagggaaggttttggatgccattgccaaagtagattgaagaggaattggaatttgagggatgcaggtgattaaaggagagggggaagagtcaaaggtgacactcacatttctagcttggtaaattggttgtttgtttattccattaatagaaatagagaaaagagacagcagaggagggcttcattgaggaggatgactttgttagtttcattttggatttaagtctgagggtcctgaaaaggcagctatatgtttggcttgaacctctccactttccaccttctcagtaattcattaatattttggatgtcctagcctgttgatgtgtgtgtactggaggtggtggtggtgggagctaatatgtttagaagttaacatttcatctgtctttatccttttactctcctttcattcagaccctacaattattgctacagggaagaaatgtggccttgcctgtgaaaatctagtttttggaattttttttgcttgttttccccctaaaatttagctccaaaagagagaagattcttaactagtggaaaaaatgtcttggtcagaaacaggagaaagaacatagctatcctagacaaaaataataataataataataataataataatcataaaagcaagggagggagggagaaagggaaagaaagagagacagaaagaaaaaagaaagaaaagacaggaaaggaaagaaaggagggctaggcatattgcctcgtgtctataatcccagcactttgagaggctgaggcagaaggactgcttgagcacaggaggtcaaggctgcagtgagccatgtttgtgctgctgcactctagcataggtaacatagggagaccctgtttcaaaaaaataaaaaataaaaaaaggaggaaaggaagaaaattccagtagaataaagaaaaaaggaaaaagaacaatatttacaagtacctgcagagagaaggtgagaagatgaagacctgttttctacttttttgggcagcactgctaaagaaataaaaaagtacccagaagtcgcaggactctaataaaatggaacatcacctctattcctgcctgttctttggaggagtagaaggtgaggaaatggggaagtgcaggatgagtgattctggagaagacatggctgtgctcatgttgggctgatgatgtcactgataactaaaacaaagggctcagccaggcacccagaagcctcagggccaccgcaccctaaggaccatgcaggctgagacaggactcttttcagtaatccggaagatggctccaccctctctagtccaggccataccctgggccatacccttagcagtgctacccaaaaaagtaaaaaacaggtcttcgtcttctcaacttctctctccaggttcttataaacattgttctttttccttttttctgtattctgttggaatcttcctttctttctttctttccttttttttttttttttctgaagcagggtctccctatttttttccatgccataccctgaaaaaaatctctggggagaggatcccaaagagacaaaggctaattttctcaccatgcttatagattaggggctttgagaaaatgagggtatgtttttaaagtattttaatagtggactgatctattttacctcctggaccagatgaaatgggaactgttccaattcatggagcaaccagacatacatgttcaaacaattatgaaaaacatacaacagatatttatcaacaaatacatcagtaaacaaacttacatgaccctgcttggccatcactgtttcttttcaacacacacacacacatttacaaatacatatatatgtgtgtgtgtgtgtctgtctgtcgatatatatgtgtatatatatatatatatatatatatatatataaataaaataaataggtaagagctgcttatagccctgaatccccacagaaaaccccgtctgtctttagtttcatgaaagcattgtactttttctcattatttttcagaccatcacagacacttctgatcagtgttccacttaagcttagccccaaatacacagaggaattttatactgaaagttaaagaagcgacagtagttagattatctcatgcctcctagattggctggctttgagcactttttcaaagtgtgtaccaactagggtttgtccaccaagttgcaatggcttgtatttgagtcagccatacgtgctcatggataaaaacaataagaactctttattaatataaatatactctgtgaaggcaaagatgtgctttaaaggaaatttctgagcatgtgagaagtagatgagttacatgaggttaggagcatgcagctgtgaccctaaatggggagaatacagccccagggagctgtgatgcacggccactgggaagctaatgaaatgggcagagccaggaccagtggggtagaattaaggcagaagcttccctcttgtgctggacattgtgctggtctctttcctgcccagcacatgccaggtaggaggctataatgtgatcatgggtcattccatgccacaggaatggattggcctgagctggccttcttcataatccaggaataaggagaagaaagaggtaggacagaagatggtcctttatgggggatgagggggatggaggggggaagcttctagaggaattggaattttcacagaaagacatttctgcttagatactaatacagacgtacatatttggacaatatacatgtagaataaaaattatttgaattacttcaacaattatgcctacttttcaaaaggctttgacatcagctatataatttagccatttggcaatattaatcataacttactaaactaaatttgacattgggataacagaatggtaaaatgcaaactgaaatcatagctttatgatcacatgaatttccttcaacagctgttcactgttattactacttatacctttgttagcattccaagaggatctgataatcatagctagcattgattgagcaattattatataccagacattcttctaagtgccattatctcatttaccctacataacaaccttatatggtaagtatcttttcctagtgccttttattgatgacatgaatgaggcacagaaaaaataggtaacttgttcaagtccacacagctagttagtggaagagcaggaattgaatccaggcagggtggtttcaatacttcagtcttagacataataccatattgccttcctggtacaatggatgctttacgtaggaggtgttatagggagaaattcccacattttcctttttatacttgtatattgtttgaatttgtttataataaggatacatctcttttgtaacttgaaaaccacaaagaagaaatagaacaataaccccattcctttaaaaatagcattgcagtagctatttcaggtagtgagatatcaaactggttttaacttttttgtttatttgttttagttttaagaatatccaaacaaagacggatacatgtgaaaacttgggacagtaaaattgtgacctttctataaagacaaagaggtaggaatcaagccaaagtgagattaggataatgtcaggtcttagtactctattctgcataatagtttattttaggtaattctctatattggttggcttgctgaagctggtgtgtgtgtgtgtgtgtgtgtatgcgtgtgtgcgtgtgtgtgtgtgtgtgtgtataaaaaatctttttagtcgttcttttttatttgtgcttctcaacatgcttaagcaagtgatatctttccatataaggggcaaaagaatttggggctgtgaggcaggctgacaaagaggaaatatatcctgtctaagcaagcaagaaaaagggaaaggagtgaaaattcttgcaacatttagctcttccgaaaaaaaaaaaaaagtggtcatgatttctcctatagtagttgatttgtcactttacacaaaaggcctagaaacatatccattatagatatgcctccttggggctcagcctctatctgtcaagtaggggtaatgggtcaatggaattgattatgtgatctataaactttgttccagctttaccatattgtgaattttgaggtttggtcaatgaatatgcaaatccaaccagaagtatcattggatacaaaagtatccgtatcatttttgagaataaaatttccaacagcatttttatatatatcagtgaagatctgtgtcacaaaacaaaactttatgaaataggaaataatctggctgatctttgacagtacaaaatttgacattccaagtcaaattttatgtttaggtagaatagggaagtattggttttgcagttttaccatatcaacacatataatatttctgcatagaaaaacggaccatctaaatgggaaaggggagagccaactagtgggtaaaatgctgtaacagtattttaatgctcaaggcccaattatgacttgaagatgttgttgtactgattagcaatactaactgaaaatttttctaacaggttcataacctaagtattttccagctatatactgttggtctcagggattggcaaagctgaatcagaacacttctttgccaagacttgtctgcaaattcttaacctttttttgtttgccaagaacaaagaaaaattgttgtaaacttagctgctgctgtaacatatgagcagtcttttccgaaaatgcaaattagacaaacaagaatcattacatcatttgcagaaatgcagttacatttggtttctgctattgtgtgtgtatatatatatatgtatatatattactttcatatcttacttgataccttttgtagtgctttaccattttcaaagcacttgcatatgtgtcgtattatttgatcttttctgagatccaaagtttttaacatgcttcatgcttgaaaactttgatacttcaatttatatgatgcatgtaacatacaacaaatgttttgattatggttgtatggaaaattcttattatatccccaaatataggttacacattttggcaaagtaagcagttattgatttttattgccacatgaactggattttcaaatattaccaaatgcatgtgtttttgtttttgtttttaatacaaaaacatcatctaatggatagtgatttatgccagtatgtaggaaataagcaagtattttgggtcaggtggattactgctgaagctttgattaggcttgaaaatttgatacactggaaagctaactgttaccctatagattactaacaaactcattgcttcaaataaaactgttattgattgttcagattaaaaaaataatgtcgacttttgttttagattcagggggtacatgtgtaggtttgttacacaaatatattgcataatgctgaggtttggggtatgaatggtcccatcacccaggtaatgcaagcaacatgattttattcttttttatgactgtgtagtattccatggtgtatacatatcacattttctttatccaatccactgtttatgggcacataggttgagtccatgtctgctattgtgaatagtgctgcaatgaacacgtaagtgtgtgtgtctttttggtagaatgatttattttcctttggatatatacttagtaatggaattgctgtgttgaatagtagttttaagttctttgagaaatttccaaactgcttttcacagtggctgaactaatttagattcccctcaacagtgtataagcattcccttttctccacagcctcgccagcatctattattttttgacttcttttctgactggtgtgaggtggtatctctttgtggttttgaattgcatttctttgatgattagtgatgttgagaatttttttcatacgtttggtagctgcttgtatgtcttcttttgagaagaagtgtctgttcatgtcctttgcccagtttttttgttttgttttgttttgagacagggtctcgctctgtttcccagaccagagtgcagtggtgtgatcagctcactgcagcctcaaattcctggctgaagcaatcctttcacctcagcccccaaatagctggaactacatatgtgtgccaacacacccagctcattaaaaaaaattgtagaaacaaggacacagtatgttgcctgggctggtctcaaacttctgagctcaatgatcctcccaccttagcctccagaagtgttgggattacaggcataagccactatgctcaggcctttgctcactttttaatggggttatttgttttttgtttattgatttaagttctttatagaatcttgatattagacctttgcccactgcttagtttgcaaatattttctcccattctgtaggttgtctgtgtactctgtcaattgtttcttttcctgtgcagaagctcttcagtgtaattaggtcccacttgtcaattttgtttttgttgcaattgcttttgaggacttagccataaattatttgccaaggccaatgtacagaatggtatttcctgggttttcttctaggattttaaaagactgggatcatatgtttaaatatttaattcatcttaatttttgtatatggtgaaaggcagcagtccaatttttcttctgcatatggctagctaattatcccaataccatttattgaataaggagtcatttccccattgcttatttttgtcgactttgtcaaagatccgatggctgtaggtgtgcagctttatttctgggttctttattctgttccattggtctatgtgtctgtttttgtatcattaccatgctgtttttgtatcattaccatgctgtttttgttactgtagccttatagtatagtttgaagttcagtgatatgatgcctctggctttgttctttttgcttaggattgctttagttattcaggctcccttttggatccatatgaattttagaatagcttttctaattctgtgaaaaatgatgttggtagtttggtaagaacagcattgagtctatagattgctttgggaaatacggccattttaatgatattaattcttccaatccatgaacatggaatgtttttccatttgcttgtgtcatctgtttgtttctttcagcaatgttttatagttctctttgtaggtatcttccatctccttgcttagatttattcctaggaattttaacttttgtgtggctattataaatggcattgcattcttgatttggctctcagcttgctgactgttcagattattgttttataaaagccacaaaaatgttccattagctaaaagtcacgtttcttagttaatagaagtcatagtacataagaaggtaagagtgtcaaattattactagttgtgaatgaattattactagttgtgaaagaatagcaattcatggttttgtttggtcagcaactactgcaccctagtgatgatgaattctctagcagattggaaagatacttagggagggaaaaaagatgactttattaaggatctctggaaataggaaaatatttaagaaattctataagtaaaaatgagtaattttatgtcagaataaaataaaatttggctgaatttatagttctccatctgcctgcttgcacctatttggggcttattttacctttgtggttaccctgagaagcatggtatggctggagcctaagtgagttctttgttttccaaccacattgtcctcttttctttttataaaatacatcaaattccttgcaggtttgtctgtctggagtacttacccaccttctttacttagtaaagtactacttcttttttaggtgtccatttaagttcaaatccttgaagaacttttattttgtaataaagattagattcatatctcctgttaaacactcttatagtattcaggatataccttctaagtggtacatgtggggcggccagcagaagaagattttgtattaggtatcacatttgagaggaaggaggccccgtggaaaaagcttcatcaaaagaaaacaaaagaggtgtttatatgtttctcaaaaggcatgtatctatgtgttggtgaaaactgccttaataagtattacatgtctaatgtgtgtatactaacatgcagctctacgaaatatacaaaaaagttaagcatatagcctatgcttttgaaagcttgagatatatttggggaagtaactatgaagggatgtcccatgtagcctcatatggagcataaaataatgaaatgctatttattatatgtcatgtatgggactggcctgtatggggtcatttgagtgctaagacaagatttctttaatttgcagtactttcccacaatattcatatgagttaatacattatacttaggaaattgcccctaagataattaaattaaaaatatattaccatattaacatgtaaacacaaattggtttaaatgttctctagcaaagatcaaatctaggacagagaaacaggagaagaaaacaggaaaatggggctcagagcaggggaatgctgtgttgtttaaaagccctggatgtcaagatctaaggaaaagataaaaaaaatagaaccaccaccaaatataaatatttatttccatatctcacaattttttcctaggccattgctggtgacagactttccagtccttttcagaacttactcatcacatccttttcatgcttgttattttgatcctgaacatccttgcaattcaaagagcatacagaggcagagtgaaattagcataatgtcacctattgctatgatgctcgttacctctacctccagaacatgccaaggaggcttccaggagccccagaaacacagaacagcaaatcttcaaaagcccagtgcccagagcagatagagaagaaaattctattttgaaatccataaagaatctcataattccttgcaatatctagtcccaattgtgtgggtgacaaactgacctatggcagaattaggaatgtgaataggaatgaggcttggagttccccattcctgctgccctaactcccactggaatgtaatttgtacaaagagtgacgacatgtgaagatgtaaaaaagaggactagagatgtcctcctgagctgcacaaggaagaaagctttttatgaccatccaattctgcaaaggacctagtttcccagtgcttattaccataaggatgcagaaagaaaaaagttcacagacataagatttcatgtgaaaaccaagaaaaaaaggttactgtattttttaaaggaatagcatttgatttggtgtaatggcaggataaagaaatgagaaataacagtggggaaaaaagttgactacaaagatgtgaataagatcagatggcatagtaattttattcgtaattaaaaatctggttcagttaatggagagatttaatttcaggagcattaactagtagactactggatacaatgtacatgtttaaataaatcataaataagtttctcctaagagctactttaatgttgtagcattctaactaatgagtagtatgacaaaattacgttgttattataatagcaatgtatcagtttttctgttgatgaaatttcttagggttagaatttttttttaccagatatgaaatagacttacacttaaatactgttgaaagttgccatataatgtggctattatcttggagttaattaaagttaatttagttttgagcattattaagctctttaagaaaactggaagacatcaaattcttataaaggaaagcaggacctatttgttaaaacaaaaagaaatagctctgtattcaagagtagttttctcaatggatactttgcccgtaaacattaaaactcactaacacttaaaataaatagatttgaatggatggctcttaccacaagttaaaggttgttatttcattaagctaaatgtagtacgtataactgatttttttttttgagggaggaggcattaccttggagaaggaaatggcttcagataacatctatgaaaataataataataataataatgagattatacgcaagatttgaaacattttcagagttggatagaaatttacacaaaccagatttcccctgggagatcctaagataaactaacaataatgtcacacacatatcctgttattttatttactaaattctaaattaaatttctgctctggtgctatgaaggtcacccagcgtactcttttagataatacaggagattccaggattgaaccaaaaccaagctaagcagaatattttccttccgagagatttgaaatttgtgataaacacgtttgattttttgtgtgacattatttggtaaaagtaactttttcagaagctcccccaaatctctatacccttctttgtgccaccgtgttttcttgtgtattggaggtggataagcaaactgcaattgggatagattttcacctaaatttctcacattttcataagtgttctgttcctcttatttactgcttgcaatccacatgtgtatactgcacacacactcacacacatatacacacacataccctcatattctaaagaataaaaacacaggcactgtaattgcatatgtgtatacttagggggttaaagcctggcttcaccactcagtgctggtgtgaacttggagagcttacttagctcaggtccttttgttttcttctgttgtttgtttttgagacagggtctcactctgttgcccaggctagagtgcagtggctcagatttcagctcactgcagcctccaaattccgggcttaagtaatactcccacttctgcctgtagctggtaccacaggcacgtgccaccttgtccagctactttttttttttttttggtagaaacagggtcttgccatgttgcccaggctggtctcgaactcctgggctcaagggatccacccgcctcggcttctcaaagagctgggattacaggcatgagccactgcatccagcctagcccaggttctttacctgtacaatggggataagagtactgatatcacagggtggttgtgaaattaaaatgagatatgtagagatatgtaaagctcttactaaagtgccagcaatataggaaagaacaacaaatgacatttactctttttatgttgtctaaagtcatatgagtatatagtgaagttttcagcataggctctgtgtgagaatacagtagtccccccttctttacagttttgcttttggcagtttcagttatctgcaatcaactgcagtctgaaaatattagataaaaaatcccagaaataaacaatttctaagttttaacttgtgcactattctgagtagagtgaaatctcgcccatcctgttctgtccctctggggacatgaatcctctctttgtccaggggatctatgctgtctacactccccaccctttagtcacttagtaaccatcttgatgatcagattaactgtcacaatgtagcagtgcctgtgtttaagcaacccttcatgtaatcatagccccaaagtacaagagtagtgacatcaacatgttattattattattgttcttttttattattaagtattgttgctaatctcttactgtgactaatttataaactaaacttgatcataggtatgcacgtataggtaaaaaatagtatatatagggtttggtactatccatggtttctggcatccactggggatcttggaacatattccttgtggataacggggaccactgtagaggcaaatggatatagaatatcctttaggtttatttttttgtctgtctttccctaaagcaataaatataaagaaaatctaaatagttggttttgacaacacataggtgtattatattctgcctttttagtgctcagtattccaatatttcattttgtagatgtgaaaattaaggtaatcaagggtggaaatgcttattggagatcatggaactggctcgtgatgcaacagtcatggagtgctggtttaaccgagttgaatacaacacgaatgcccccatgaaaagcaatgaatacagaagtgctcaaaagagtttacctaagaaaataaataggaagaataaaactcaaagacagagaaggtatattaatattcattatcactgaagagaagtaaacttaattttttaatattataagttaatgacctcaagcaaagtcagatattgaaaggtgatcgtttcaaagattgaaactgagtgaaaatatttcaggaaaagagagttttagctattcttaaagaaagagaaaaaagcagattcaaggatagctttttgaagaagatacagcttgaaatggcttcttttactccctcagttaaaagtggtaatggatgtgcctaactaaaattcccacaggaaaaacttctttagttcacctctctcttcctgctttttttagttgatttcctatgtaaatatgagagctcttaataaaaatatgacagaaagttggaaagagttttcctgaaataaataccagatgagtatagtggttacttgaattatgtgcagaaaagaagatgatactctacaagctcggcttttcggcgacaaatctgaagtccatctccattgtgagtatttcttgtgtggcttggacttcctccattccagagaaagaatcagtcctttgggaatccatgaagtgtgtcctactgtgccaggcctcagccactaacacaggtccctagagagccacgctgtcttgctccatgacctccaatgagaaccccttcttactgccctttcattgattaaaacgagacatttgctgggacctcattgtgggctaagcacattgcagtcagtttccacataatgttgctcattggatcattattttaatttttctctctttacctcccccacagctgtctttccttatctgcaatgttgcatgcacaatatttactttcagcaaatgatgtaaatcacccttgaatgaaaagactgaaggtgcctcacctttcttcttcctgtcctattactgtgttctcatggccttggattttctctggataaccacgtatcctagttcatgcttttgtgtcataaggaaaagttggcactcccttttgaaaagctaaacttcccttcctgctattcatcctgacatttctgccctttattaggaacttgattcaacaattttctcttctcttatatcttcaatttctccctttcttgtttctttcctttaggcttaaaaatgtctttaacatccttaggtctttcctattgttaaaaacaagcaaactcagaatccttttctcaaacttaatactttgttgagttggcacccaatttgcctttttttttttttttgagacagggtctggctttgtcacctaggctggactgcagtggtgccatcatagctcactgcagcctcaaactcctgggctcaggtgatcctcccacctagcctgagtagctaggactataggtgcccaccaccacatctggctaatttttgaatttttcatagatatggagtttcaatatgttgtccaggctggtcttgatctcctgtgctaaaacgatcctccaccctcagcctcccaaagaagtgctaggattacaggcatgagtccacgcccagcccttaatttgtctatttttattgttaagtttctcaaagaaatgctcaatgcctgggtcaaggacctctacagatcttgagtctccttaggacatccctttccaactactcatctatttgatgccagattttctacatgtacttcaaccaaaacaacatattgcaacagattgaatgcagaagcagatatgagaatctgctgccttctatgaagcaagacattaaagagatttgcaaaaatgtaaaccagtgctctcttcttttcaaaattatttttattagggaaaatatatttttcataaaaactaggttatttatattactatttaatggagttagcgttgctatttttaaaagagtttatttaaaaagtcttaacttctttagtggtaatttctagtacggtaaacactggtagatttaacccacagaatcagaagctctttgggggtcctcagtaattttaatagtgaaaaggagttttaaaataaaagtagttgacactttatgaggctgaggcaggtggattgcttgaggtcaggagttcaagaccagcctgaccaacatggtgaaaccccgcctctactaaaaacacaaaaattagttgggcatggtggcacgtgcctgtaatcccagctacttgagaggctgaggcaggagaatcacttgaacctaggaggcagaagtgagcgagatcatgccactgcactccagcctgggagacagagtgaggctctgtctctgaataactaactaactaactaactaaataaataaataaaaataggagttgcaaacagtaggtctatatccgtgattgcttttcctcaccactgttgcctcctttttttaaatctctgaccaaagaactggctccacttggtgtcctgtatcagatttcttgggccggccatggtggctcattcctgtaattccagcactttgagaggctgaggcaggaggattgtttgagctcaggagttcaagaccagcccgggcaacatggcgaaactctgtttctataaaaaacacaaaaattagctcagtgtggtggcatgtgcctgtagtcccagatacttgagaggctgaggtgggaggattgcttgagcctagagggtggaggttgcagtatgccagaccttctagatacaagcaagcctcttaccttagcttcctgagtggctgtgatttccctagtcttttatcctccctagttgctaagcaatgtttaacagtgcctacctctcatttcttcttgatattctttccttctacggcaacaaattcccctgatttcttcccaaccttcctgactacccatctttttctctcttggttcctttttcctgggagctgtattttcctcttagctgactcagtatgcttttccttaaagattttttttttctattgcccttccaaaattttttctagatccaaagcctttctcacagtgtcaagaaaaaaacattccagttgccagatgaacagcctgtttcagtatcatgggtctaaaaccagacaccggtttttcctccagcaattcttctggttaacttgatgcctctgtctatcatggaaaccgaatttcctaagtcatgcggatttaaaatgctagaaaatttcttactcctgtcaccactacatctaatgaatcagatgttctgtttgttcttgtgtcatcccagtccactccctgacaaagcatatctgcaagcttatcatcataaacctaggctatttcaatgctcacgtattaaccgctcatcacatgaatagaatttcatttgcctgatttaccctacacagcccttcaaatttatcaacgaaatcactggttttcaacttttatttttaagtaggaaaagcttttccgttaagtttttgcaaacaaatataatgcaatccaatatttgccctccagagctatgccgatttaccgctgaaaccttgagcaaagaaatactcaaagcttcttctaggttgtgtatgtatcacaacagaggaaggaaattatgagatgggcacttgggagactgttttcttggttgccctctccttgtgaaaggtagggctacaagcccccatttgagccaaagctaaggagtccggtgcccatgaaaaagacgcaagcaatgctgtcctccttgatggaggctgcagaggccagaaccacacctgctcagcctggccctgaggctgcccctgtggcactgctgaaagtcagtcttttgtcacaaggaaggcagtttttctagacaagattattctcatcttaagcatgaggtaggggtgtgtgtgtgtgtgtgtgtgtgtgtgtgtgtgtgtgtagtgtctaagtctacttgcctgctttctgggaactggtaagagataggaagatagaagtcatcatcattccaaatgtaggctttcacttaatttctctattttcagtctgagaccacacatttacacgtctctcagcctgcatccccaagctcaaaatatttctgctttaatctcttcagagactaaacctcctgtcccccactacatggagaaggcttggttacctgttattcaaggtgttgcctggatctgtgtatatactttaattcattccctctgttttcagcaccaacacccgccccctttcctcctagcttccttggtacttggtgcctccaatttttgaggctttctataattacttagcacaaatcaactttcttgttgattttcttctttataggagcatagatttcagcatttgtgactttgacaagtcagttgttacaaattcatcagctgcccatctgataaaattttaatgtcttttctactctatctcttctagcttttcttttcttgtgtgtcgatacccattttatttctttacttaccctcattttagtggcatttcaaaaggcgtactagttacctattgctatataacaaattaccataaacttagttgcttaaaacaatgcacatttattctcttagagtttctgtgggccaaggtactgggtgtagctcagcttggccccctactttagagtctctcacaaggctgcagtgaggtgctggccaagactgggatctcatgggaaggctcaaaaggaaaagcatctgcttgtatgctcctggagttacaggcaggttttagttcctgatgagctgatgaactgacagtcttgttctttagtgactctgggccagaggtcaccctcatcccttgccacatggctctctctctatagcagtttgtttaatcaaagctagcaatggtgagaatctgccaacaaaatagaagtcactattttgtgtgacataatcacagaaatgacatctcatcatgtttgccacattctattggctaaaagcaagtcaccaggcccgcccatactcaaagtgaggagattatacaaggcgtaaataccaagaggcagattagaggctattttagtctgttgatataggaggccaaggtgataaacacatgggtccaagtctctctctaaaactggagtcccctctctctcacttccatcaagcttacagtccacttctcctgtcaaggtcaagtagtgacctccatcttgcacaatccagtgaactatcccaagtgatcatcatactcaaacaaacaaccagtagcaactgacatattctcttcctgaggcattttatttctttggatttggggatccctcacctccttgtcttttcccttcatctcttgtctctgactcacaggctcctttgttcattctcatttttcttccttttggagggctaaatgctagaggtctacagggctccatttgtagcccttcactcttctgtaattgtacctaagaaatctagtctcatgacttcatagtccatgtatatattgatgactcttacatttatatctccagctccaacctttcccctatgccccagatagtacccaattggcatctgtacttggactcaaagacattgcaaacttaatttctcaaagaattaaaaatagaactaccattcgatccagcaatcccactacttggcatctactcaaaggaaaagaaatcattatatcaaaaagatacccccacttatatgtttattgcagcactactcacaaagggcaaaaacatggaatcaacctaagtgtccatcaatggattggataaagaaaacgtaatatatatacatacacatacaacacacacagacacacaccgtggaatactactaagccataaaaaataaaatcatgtcttttgcagcaacatggatggaactggaggccattatcttaagtgagataacccagaaacagaaagtcaaatattacatgttctctacttataagtgggagctaaatatgtgtaccatggatatagaaattggaataatagacattggagactcataaagttgggagggtgggaagggttcaagggatgagaaattacttaatgggtcaatatacactaaaagctcagatttcatcgctattcagtatatcagtataacaacaaaactgcacttgtaccttctaaatctatacaaataaaagctaaaaaatgaaaacaaattagacatctcaaatgacaacttaatgcagaactcttgatttcctcatccttccctgacctttacctaaaaacacactctgcccaaactgatgcccatttcaataaatgtcactaccttccacccagttgcttaggtggaaatccaggcattttctttgttcctcttctttttttcacaccccacatacacttctcactcagcatatcctgacagcgccaccttcagaatatgtccattatccaaccgcttctccccagttctcctgcaatcacccaggcgtggtcatggttgtctcttgcctccccttgactggtacatgtgccgttcccctttgcatcaagcttacatctgctccaggatgtttatatttgcagttctctccacctgtaattcttatccttctgatttgcatgtaactcactcctttttatcatccaggtctctccttaaataccacctctttggaaagccttccttgatcactctgtgtaaaatagccaagcctccgttattcactatcttcttttgctcttttatttttcatatatgactacgtgaaagtactgtctgttgttatatgtctagttacttgttatgtgagtataagcttaatcaaggtgatgctttattgcacttagcgctgtttccctgcaatccagtacaaagcccagtatgcaagttataggcatgtggtaagtgttggatatgtgcaccagttgttggacaggattgaacttgcgaggtcagctttctcaggtgacctcaaaggcaagcatctagtttattgagtagtacaacaataggtatgttgcatgtacatatatgtataacagaagtttatttttaagcctgaattagtgatagcaactctgttcatgagtgattatgtggttctttttcatctttactctttctcagagaaattcttctcttcttcccacattgtttgactgcttagagtagataatagaggagtggtaagatgtctgagtatataatgtaagggggtttggttcttgtcatatatagaatacatataggtcctattataaacaacatatggttcttctcatatatagaatacatacaggtcctattaaaaacaacatattgtagctttaattcaacacacgactggttcttgtataaagtttcactgagatctttattgtggagaattgcatgactattccagtcctggactcaatttgaataaaaacataggaaccaaattcctccactaaataactgattgatacttaaatttgacaacgatagctttatagaatagtccagaacatatacagtcgtacctcacttaacaatgtggctacgttctgagaaatgtgtcattaggcaattcccgtcattgtgtgaacatcatagggtatatttacacaaacctagatggtatagttcactacacacctaggctatgtggtacagcctattgctccttgactgcaaatccatacagcctgctactatactgaacactgtaggcaattgtaacacaaaggtatttatgcatctaaacatatctaaacatagaaaaggtacagaaaaatgcagtatagaaaataaaatatggtacacctatgtagagcacttctcacgaatggagcttgcaggactggaagttgctctgggtgtcagtgagtgagtggtaagtgaccgtgaaggcccaggacattactgtatacggctatagactttataaacattcttcacataggctgcactaaatatgtattaacaatttttctttcttccaaaattaacctaattactatatcttttcactttataaacttgtattttttaaaccttttgacttttgttatacttactttaaaacacagacacattgtacagctgtgcaaaaatattctttcttcatattcttattctataagctttttctgttttaaagttattattaattattattattttactttttaaacatttttgttaaaagcacacattaaacacacacacacattatcctaggcctacacaggatcaggataatcaatatcactgtcctccacctccacatcatgtcccattggaaaaagtccagggacagtaacacacacggagctgtcactttctgtgataacaatactttcttctggatacctcctgaaggaactgcctgaggctgttttacagttaactttttttcagataagtagaaggagtgcacttaaaagaacaataaaaaggatagtaaatacatagaccagtaacatagtcatttagtgtcattatcaagtattatgtactgtgcataattgcacggactagccctttataccactggcaggacagtaggtttgtttacaccagcaacaccacaaacacgagtaatgtgttgtgctacaatgtcactaggtgataggaattttttagctccattataatccttttttttttcttttttttgaggcggagtctcactctgtcgcccaggctggagtgcagtggtgctatctcggctcactgcaaggtccgcctcccgggttcatgccattctcctgcctcagcctcccgagtagctgggactacaggtgcccgccaccacgcccggctaattttttgtattatttgtagagacggggtttcaccgtgttagccaggatggtctcgatctcctgaccttgtgatccgcccgcctcggcctcccaaagtgctgggattacaggcgtgagccaccgcgcccagccagctccattataatcttatgggaccactgtcatatatgtggtccacggtttagagtatggaaatgactctatttccatacagtacttccaataataaattaagttgtttgatttctagattgaaaatggctttgataatcttgtaattggatttatatgcctttgagtctctcaagtagaactgatttacctttccattcctttctctttcctctctggtcacatccctattccacatttgttttttttgtaaccagatacacaaataatactttgtattaagtggttatagtgaaagctgggcattctgttctagtgaataatgattcttatattccaaggacaaactacctattaataataattgggtattcggggcttaaaagttgtatttgaaagatgcagccaggtgtggtggctcacgcctgtaatcctagcactttgtaaggctgaggcaggcagataatctgaggtcaggagttcaagaccagcctgaccaacatggtgacacctcatctctattaaaaaagaaaatacaaaaattagccagacatggtgggaagcacctgtaattccagctacttgggaggctaaggcaggagaattgcttgaacctgggaggcagaggttgcagtgagcagagactataccactgcactccagcatgggtggcagaatgagactccatcagaaagaaagaaaggaaagaaagaaagagagacagagagagaaggagagaaggagagaaaagagagaaaagaaagaaagagatgttatccatgatttagtggaaatgagaaaacctagaaaataccatgcaattctaatgaaaattctagaaaactagaaaaaaggaaagagaaggaaattgagaagaccctgtaatctgttgaaatgctgagttttcctaattaaggaaagtaaaattctagtcacttaaaatgcctccaagaaagtcactgtttttgtccatttatatctttctgctttctttttcattttttccctaaaaattaattaaatattaattacttttagaggaaagattactctgataaaatggtcaagaaaagcaaagtttcttactttctgtgccaaagattttcagccaaagtaataaaagaaaaatcttaaaaagggaaactatgcaattcgaatggaagatccattttaaaaagttattgtggcagtataaaatgatactgtgtgctcaaatacctaaaaacttttgcaacttacgaaatggtatttttagtattacttagggtgttgtatgggtgtcttatgtaacttgttaaggtaaagaattttgctattctcaacttcagtttatgcatctataaaatgagaaagcgcaaaataatacttctacctcatagggttatcgtgaaagttaaatgacagagggataaatgaaatatttagtatagtgcctaccacaaaagccaaagctaaataagtgatagccaagaacaaacacagaaaacttcctaaataaaaatatgactagaataactgcaatgtatggaccaacataagcatgtttaagagtgaacacaggtgctattagtaattacacctggaccaaaagtataacccaggatgctccctgacatactagaatttatggtttctctatctataatctattaacatagcaggcagtaaaccttctcttttgtggagaccacacatgcaccagacaagcagagcctggattcaatagtgtgccagtaactcacccagattttcaagaagtaatatttactgggattatggattaatcagagcttgtgtttaccaaagtaaagttcaccaatgattcttcaaatatgttcacaagctaacttggcttatatccatttacttataaatcagaagattccccaagattttactgtctgcctgattaaagctagtatgtgctataagtgttttcaaaatacttttttccaaaactgtccttgcagttaaggtgctgttaattcaaagtacctatgacttcctatcagaaatgaaaatgacacttaatgagaacaaaacatgttttcacttgaaatgcaattaaaccaaattagagaaacagtgtttttctaactaagataaaaacagctgtgtttatgaagctgctctaatggtattagaatttctcttatggaaacttttgctttatttaagatatatgatttttattttaattgacattttagacaatgatactttcattacaattttttcagtcaagtatttctttagggaatctttcctataattcatagtgagctaatttgatcatgtattaatagagatttcatggagatttgtttttaaaggtttttatgtgaaacctttaaaaggcctcccaacaaaaactttacttcatgactagatatgatttaatcatgattatgtcaaaattgtaatttttaaaatgccttaagaaaaataatttctgcatacatttgtgtaatttttctaaaatgcaaaatttgtaacaatttctaaggtgtagaaaaaacatttacttaagttgctggtttttttaatattcatgtgtatgttttgggattttgtagatataacctatgccttagattactacatgttgatgtgacttgctgatgtttcaccaaaaaaaaaagaatgcttccatttctacacttaacatttttttctttatctttcataattacggtccataacacttggagtaacaacatgttttcctgtgtatatataatataaatggttatatacaaacaatagaagaaatacgcaatttcccaaaatgataacatttgaagacgtcattaccaacaacaacatcactagaaacattactgctgttaagagcttgatctagaaaatataagcttaaactgctctgtttggaaacagcatgtaatcgggatatttaactagaaattcaagtacaataaaatggatttaattagttatgtagctataaaataccttaaatttttttaggctatgtctgcatgggcaactacttaaatgtttttagattaatttattttagtcaatttaattttaataattacctcaactatatgttattttcttcctttaaataatcacagaacacgctgttttaggatcaggtagaagctgagacaatctcttttgaacaaattttatttttattccaaaattaattgtcctaaaaatagtacatttagccatgaaaaagagaaaacaagtaaacctatcaaaatgggacactgttaattaactaaacatagaaaatagattcattcattatccaccaaaaatttcaatgtacctgccaggtaaaagcaccatattcagtaccatgaaagtgataacgattccaataacagaacatcttccctcaaagaacttatcacatgtttatgtataagtttaaatgcattgaatgtcaaaaatgcagatagcgctttgatcaaggacattttagcaatgtattcagacaggatctttattttctagggttttcattataaggcagaaaggttagactaaagagtaatgttaaaaatacaaattatttttgtattctagacatttctataagaaatgtatggaaatagaactgtaattttggcagtttttgtcacagtgtcagtgagcaaatagatgtcatactcatgagtacagaaagaggacattctctttaacagccacatacttcttacccagaaacccttggagaagatttataaacccacatactcagaatatggtaatgaggaaatgctgtctgccctgggaaggggaagaggatctaaaacatttaggacaggtaattccacaaccatgccttaagataaatccatgccttgaaaagtaaaaagaacagcaaaaacagctagttagtcaaaggtcaagatagcaaaccctagctggtaaacttgtctgaatctttactgtattcctcaagctataaactatgtttatagactccttcaaacaggattaaattttggaggcattttcttaaaaaaatagtaaatccccactgtaaaattagttataggctttggacaggattcttgccaatggggctcagaggcttaagttttattaatttcacagtaactccaccttagttcacagatattttcaaaacatggaaagtgtgattgaagtcaggtaagtctaatcaaatatgagttctggtgccacagaacggtgatgttgaaatacttggcttttattggctatttatggcttttattggcatattaatgtcttttactgatgatctcaagttctgtctatagaaacactgatgtctgattgtaacagtttaatcaatgtataaaccaatctggatggttcagatctcaattccaacgtttcctttagaattcaggctcaatttatctaaattgggctcattatattattattaattttactttggctgtgggctgagttaaagcacactatgtttttgagcattctaagattgttccaggatttaaaaatttaagattactttggtttcttggaattatttaatacacactgcaattttccctgaaaaacacatgtaagctaaaatggctctatggaaatgttttatgttttaatgaggttgggaaacagagataaattcacctggtcataatcatatggtaaatattgatgaaaggaacctttttctaaactgcatagctataattctattccagctgattttgtagatttaaaatattttaccctgtttttgtgtctcttaaggagtttctgtttgggttatttgtacagatcaacagataaaaacttatgtcctagaacaaaaacagcacacttaaacacatcttttctttcaggccaaaaagtttgctgtttcaggaccatggacctccttaggaacatgtacatatttccctaatgaatccttaggctgtgatatgttttcgagttaaattgttattactgatagaaaagttctttatgtctgccataaatgtgcattaaagtttatatagcattcaccttcatgattggtgttttatcttactgattattttggcagagaacaaataccaaaagtctccccatgagaaataaaaacaaaccacgaccctctaaaaatagaaaaaaagccacaactcttcaggtcctccttggacccatggacaaggctcataaacctccttggtgtccattccatgttctgtgaatctggctgatggtcaaagaaagggctagagacaggatgatctacaaatagaggagattgaatttccaaatgaggtttgatcatctgctctttgtgaattttttccaattgcttccccatgtgccttggtttagcctttcaaaaaattagaattttatacccctaggatgtaaaataccatgtcagcgcactttttgtgcctggaatgcaccttggagatagccttgcccattgaccagctcttcatttttcagagggagaagaaagtgaggtctgggaaagtaaaatgcctgcccaaatccacagagctaagaagtagcagagcagagatcattaccacacattccaaactttcttcctatttatcatttttctccttgagccccttcttgtctgagacactacatcaattaaaattattttataactgcaacatcgtacaattgccatgtaacacattgcccaatgcaattcaatcttagcatctggaaacaatactcatttattaactcacactttgtaggtcagaagtctgagcacagcatagcaaagtcctgttcttagggtctcaccaggctgaaatcaaggtgttgaccgggccgtctcctaatctggagtgtggagtcctcttccaagtccattcaggttgttggcaggattaattcgttgtagctgtaggactgaagtctcttttcttgctagctgtcagccaggggcagctccaagctctcagacgctgccctcaggtcttagatgtgtggccctctcactatacgacagctacttcttcaaagccaataggagaatatttctcttcaggaaaggttcactccctttttaaggactctgctgatgaggtcagacccactcaagacaatctccctcttgattagctcaaagccaaccgactaacaactagtcaagagtggtatcccatcatagtcgtaattctcacttgtgctcaaaggggaggggatcatacagcatgtgtgtaccaggggacaggagtcttgggagtcatcttagaattctgtttgttgggccgagcgcggtggctcatgcctgtaatcccagcactttgggaggccgaggcaggtggatcacgagatcagaagatcgagaccatcctggctaacacggtgaaaccccttctctactaaaaaaatacaaaaaattagccgggtgtggtggtgggtgcctgtagtcccagctactcgggaggctgaggcagaagaatggtgtgaacccgggaggcggagcttgcagtgagcggagatgcgccactgccctccagcctgggcgatggagcaagactccgtctcaaaaaaaaaaaaaaaaaaaaaaaaaaattctgtttgtcggccaggtgcagtggctcacgcctgtaatcccaccattttgggagaccagcctggccaacatggtgaaatcccatctctactaaaaatacaaaaattggccgggtgtagtggcgcatgccagctactcgggaggctgaggcaggaaaattgcttgaacctgggaggtggaggttgcagtgatcccagatcgcgccactgcattccatcctcagtggcacagtgagactccatctcaaaaaaaaaaaaaaaaaaaaaaaaagaattctgtttgtcacgttggtctgattctactcattcaagtactagatttccttttgcctcctcttaccttctgctgccccccaactgagttggttcattgtcttccatcctacagaaatccagaaagggatgataagagaaggtaaattcagactagggtgacgaaaactccaaatccatgaacatatggcatttttattgggttcatgtattctttgcagctgtaagggcattggccagggataattcagaattaccttttcactaattactgaatagtaaaatttacctattctttgggcatgaagcttcttttaatacggctggcctggattcagagatgtctggggacacctgtgctgggttggcaggagcagcagcagctggaagtcaggggagagtggcaactaaagacctgccattttcttagtgcctatgcaggctgagactttactttcatgagctcatttaatcttcacaatggtgactgatacagtcaatattataatcctcattttacagatgaggaaatagcagagatgcagcagagtcagagttcaaagctcggtcagatacaccagtgctttttcaaggacaggcttctccttctcaggttttggttactcttgttttcttttttcttttttgagacagagtctcgctctgttgcccaggctggagtgcaggggcgagatctcagttcactgcaacctccgcctcctgggttcaagtgattctcctccctcagcctccggagtagctgggataacaagcacgcgccaccatgaccacctaatttttgtatttttagtagagacagggtttcatcatgttggtcaggctgggctggaactcctgacctcaagtgatccacctgcctcggcctcctaaaatgctgggattacaggtgtgagccactgcgctcagctgagacagtgaccctctgagggtctcagcatatttaggcagagattgggggatggcggagggagctactgagtgacaggcaccctctgagagggagcctatctcaagcaatcaaaaaatatcaactatatgtagggactctttctcccttcaagagttacaattaaacttttcagaaatcaagatcaaggctatagatgataaaaattttattcctaaaggaatttatagacaagaaattgattgaaccttataataccccatgatggttcatgagaaacacgtgttcatatgattataccatgtttttaaatatggggaaataaagcacagagtaggtgaatgtgaatttagggacatcaaaatgtaatgacaaaaatcagctaggcttgttcttgaatccctcaaactgtaacttttggctgaacaaatgaattaagatatagctaatacagctgcagagcttggaaaagttacagttgctttgttaaagtatattgagttggagtaaaaagttctatttggaaagatttcaaaacccttcaatggcagcccaatcattccgaagctgaattaaatgtaaattgtgaattatctgcatacgtttatagtctattcattttaatatacatacggtggttgtgtactttaagaagataaaaagatgattcctgaggcatcattactgcatggcagagagacaaacttgaaaacaagtaattataataatgcaagtgttaaactgaagatacagagaaggaatacacatattccacagtcactggttccctttgggaacatcaggaaaaaacagaagaggaaagttttgagttgggtctggaagaatggaactttagcaggcagaaaaggagaagaaaattccaagtggtaagaaaaacacagttaaaatcatagaggcaagaaaatataagaggctagaaaaccatagttcagtgtggccagggtgcccacaatgcaccaggagaagatagaaaagagattgtttatgcagcaatgagattggaaaggacctggctgccctctaaggagaagtttctattttatagcagcaggaatctaatagagacgttacacgaaggaatgacaagataatcgctctattttagaagattaactctggtagcaggagctgggatggctgggggtgtgaactgaaactgacgctgcataagaagagaatttacaagcccagtcaaagaatgaggaagaggacccaggtcagggaagaagcaagacaggcgatgagaataaaggctgcttcagaggtgaacactgtagaattgggggcaccaggtggctggaggcaggtgagaagaaaaggaagatgtaaagagaaaaatgaaggatgatgcctagtttctgatcctgagctctgtctggctttttttgcggggaagagatggagattaatgaattgtctttgggcatgtttagtttcaggtacttggaaatacaggcttgcagtttagaaaacaacttacagctgtagataaacatttacgaattatcaacatttgaggtagtggcaagtaaatgatgtttttatagaattatcatgtagttaagaagaaaacagttttaaatattggaccatgggccagcatttaagagaaagttaaggaaaaaaaaaagatttaagaaaaagacacacagaaagtcatgccactgagattttactatgagtcccaggcaaaggttttaagatgagtgtatcaatgtcccctaggcataaaaaggattaaaaagagaagagttcagatgacaatttggaaggcactggtaaactttgagcagtttaattagattggtggagagttggagacgagacagagtccttgaactgataaacaaaaaaaatctgagagtatttggtagtgaaagtaaaggaagggtcaaaagaaaggttttgttgttgttgttgttgttgttatggtttcttcgatagaaaggggaaagataatggttaattggggtaacccagcagtagagattggcagggcaggtaaaccggcaggataaaggaaggagagtatggattagattttaataaaagtttcttagggaagaggggaagaaggaaaaaaaatgagttgagaaaatatatattaaattctttacattgtgcttctgagacagagctatatttagcacccataataaatatatctgataagaatcctagtatgttgctgactctcagcactctgcttattattatgaaaataaaaatgacttccatgtcattctgtcagactatcttttggaaaaaacaacgacaacaaaaataaaaatgtcattcaatccgaaagcaagagaaaagacaccttagtaaaagtaactttcttcttccacctacaaaaccagaacttgaagacacaaatctcaggtgtactgaaataatttttttgtgcctggatataactgctttatgggatcacagagacttcagtacacactctgggacaaacagattattcacaaatgatgatccaaacatattctaggcattcaattgaataaggcccaggatcacccccagaatttttctctgggcgccaaagaatcctacatgctgaataagaccctaggcaagaccagagctccctgcaccatttgaattaggtagtttccatcttgcacctatgggaaagagttggagccaacccaatctttatgattaggcaggaaaaacaacattttccataagaatgtaatcttctgcatggttggtcaccagttatttgttggacatccatttggtttctgccaagttagctaattgttctgctaaatcatctttaaaagatgacttgccttcttgagttgttaatacttgtgaaattcttttcccaaatgaatgagaattgaaagacatagattcttttaacacacacatacacaaaattcccaaacatatagtgtgttgaaagttagtctgttgcaaagaaacttgagttctaggcccggatccaggggtggagatgactgtaacattccaccaagaacttcactcttggctttcacctcgaaactaaaaatccctagttaagtcagatatatgaagtattgcactctaacatgaggaggaactgaagaaaagggaggatgttttcataaagatttagtgaggaagttagaaggaattatgtgtgaaagaaggaaaaagagtaattgtggtattattacaatacatgcctgggccaggtacagaatatgatgggtccgtgtttcactccatacagccctgttatcatgatgacattatgaagtaatttcctatatactataatctgttttggaaatgctttctaccaggtgtctcttatggaacatacaggaaaaaaaaaaaaagagttgacctattaaattactctcgctgttcaaatatttgaagtactaattcatcactcatgacattcaatttatattttaacatcattataaatttaacagggttgaatctttcaaaataacaaagaaagtgccttttgaaaggaaagaagataggaacgttgaagaggttcttgtgggatcactcttaaaagccatcaaagcatctgaatctctctcttggctgtataataaatattcacagaaaatgaccgccaagtatgtatggagaaatgccttggcatttgctgtatgaatatggatgatgggaatatagtaaaatattagagagattaaatcgaaactcaaagatagttctaaggtgtttactgggtgtcacttgatgaaatgactctatggggatttatcactaatctgtgaagtgaaaaataatcttaatgacgagaggaagcttacctacattatgcctaggacaagaagtttttaattcccctctaacaatgcagtgtttgcaggttttcatccattatcactttgttagagtatctttgctaaaacccaactattttataggctcctctgacacctcacaagaatccaagggaggaaatgaagccaatgaatgtaatctacaggtgaaatttgcagagcaaattcaggaaaaaaaagtaattatgcttcttcgcattttatcattttataacctcaccttttagagaaggtattgagagattatactgattagtccagatttttattttacatatttgttcatggaaaggcttattttaacagaagttatatcaaggtgtcatgcccagtaccatcatcatcatcatcaaaaatttgactgaataaacctaagtacacacacacttctgtatgtatagtcttacatatgaaagtaatatttattcattcaccaaaaagtgtaaagagaggttaaaacaggatgggatgaaacagtgtacaaaggtaaggaaaagcttttccaagcaactgaatttcccttgaagcctgaatgttaagtggaattaggcaaagtgtggtggttgtgggaaaattcaggcagaggatatagctagtgcaaaggctctaaggctgcaaaggatgcaagctatgcaggcatggtgcaaggaggcctttgtgcaggaagcaaagggagataaggctggggtgacccacagcctccttcttcaagggcactggatagactcctgggaagcaaaaagtgactggattaaatttgcatttcaaaaagactcttctgactacagtatgtggcaagataattgggtgaagcaatagtccaggtggaaagctttattacagtcaaaacaaaaaaggatgaagacttggattggggtggtacttagtgaagaggcataaaagaagactgaagtcaaaatgacaggacttggggatgggtgggccacagaaagaaggtgtcaaaatgattgtcacagtaggtaattagtcattgattgatagaaaatggtaatcactgaactaggctttttatcttcattctgttctatttaggttcattctatccaaagtatttagtgcttaccagatgcaaagtacagttaggaattctaatggatagaaatataaaataaatggatacaaggttatataatctctgccttttataggcttatattcaaatacagacaatgctttccatttccagtaaagggaatgagaaattatatacccagatacatatatattgacacacaaataaacagatgtatacacatgtatgtctacatatgtatatatgtatgtacacatatgcatatataagtatatatatatttgcatcatatacacatctaaattaagggtgcattgccaggggactgaggaggataaataatgcagaggtcagaaaaaataactgaaaagttgtgtgggatggtattcttcttataagaaattcaaatgttttcaaaaatgattgtcttatatatctgccttattacagaagaaatgtatgacgttggccctgtttatcagggccagaagaagaaattcagcaatagtatttagcagtattaacaattttaatccatgatatcagtcatgacactacaatcctgacagtaatcttattaatagtaatgataaataatagtaatcattagtatgtagtaatttttaaaagtcacacaagcagaaaaacataaacatagatttgattttaatgttgtttgaacattgccttttagcatttttctttgaattctaagctcataattttatcataaaactgtctttacagcagacaatgactaattagtaattctattaaatatttgccaaatggagggtaccacttctagttttgccagagtgtcttgctggtcagaagtgctttgcctaataaactcaacatgcatgttgatgctaagagtctaactgaacacacaggacaatcgcaaatctgtgaattattaagcctcctttcacctcaatttcctccctcataggatggtctttgcttatctcagttttgtgtgtattccttttgattgcttgttaatgtctcctatttatagtgatattatgtaacagtattatttaatctccaaaatagtatacaattgtcaagtaccattgctgtaattatggtgcagatgttggaatatgcttggaatcactaaaagtgaatttaccataagctaaggaagcttactcttcagggactctgacttgcaagagcctatttaatttcttattacctaaatttgtaagtttaattttgcagtatttttcttttaaaagatcccccaaattttatgagcttcatttccagaaaactcatctggccttgtttttcatattgtattgtcatatttaatttgtttttatgcctttctcacaatattttaggttcatgagatcagagacagtattttatttgtttctctactgcctagcttattatttatttatttatttatttatttatttatttatttatttattgttatgagacagggtctcactgtcacccaggctggagtgcagtggcacatttatggcttactgcagcctcaacctcccagggctcaggtgatcctcccacctcaacctcccagtagctgggactacaggggagcaccactacacctggctaatttttgtatcttttttttttttttttttttttttgtagagacaggatttcctcatgttgcccaggctggtcttgaactcctgggctcaagcaatccactcatctcagcctctgaaagtgtaagaattacaggcatgagccaccatgcccggcctgtctatcacttagttcagtaaatgcttggtgaatgaatgaatcatatacatttagtggttgttttgaagttgactctgctgagtgagattttctttgcattcatgcatcttcattaatgtcaactttgttgcagtttttaaaaaagtaatctttgtttacattatcttaagttacttgatttaaaaaagttaaaagtgactatttgcagaattctaaagtcccattactgtcaacatgcataatattttgccaaaaatgcaatttgtcttgttagtcttctttaatttttccatgttttaaaacttttcttggagtatttcccaaatgggatttactgagaggatatattcagccagctttgtagattctaagagtccttctaaaagttaagtctagccaaggaaaaatgtagtggcacacgattgcgtttctcttacgctgtcatttaatgtgagatctaaattttgcatttctttaatgcccaaggtgtttattttttaaaatctgtactctttttatcaggagttatgttgacaatttacctgggagctgatataccctatataatacatgatctaagacctgaacaatacacaaattaataaaattaaaccattaagatatgtcatcatttctaaattatacaattgggttttttttttaaagcaaaaatattcttcctcttttctccatcccttgttctggtcagttccaaggttttttacaaatgcaaaagaaattcatttgctactcctgaccacagagatgaataatttaaggacaatatcaaattcttgataaatctcataaatgttttaactgtccaagaaatggacatttatttggttaatcttttagctggccataaataatgtaataaaaccccttaaaattaacattaaataacataaagacctaacgatttttagaaaaaaacctttttggactgagccttgaatttcctgagaattcagctacaagtgataactaaaatgtaactcgagaatctggatatggttccagaaaggattgttgtcatgcaattgccatttcatcatctttccttaaagtcccttcaatatttatcattgcaatttttgtcctgtcttttcccctccatcacatcaaaccaaggaaaaacaattattaaatgctcatttatactcacctccctcccttcatattcattcattcctcagccctaaaattcctgtaggaatcctgcttttacgttttatcttaaagccaccatagtatctgtaatctcttttgtagtcatgtatgcttaattttggaagactgtcaactacctcttcaggttcattcaaatgaaaatgtatcacaaaatcgtaggctcttcccctatctcactgaaaaattactctaaaaatgaccagtaagctgttttgttgaagcaaaacatccagaccctaaacaaaagtagcagaattacaacatttccatagaaatggattttgagcttcttttttttaattggggaaaatcttattttttaaaaaagaatcccagaatacatctttgctttcagtccttcaattctaacataatgccatgttagagaatatgtggtagtgtatactaagcccttatgctgtctcacatccttgggacaaaatatctgttttgaaaggacttctctgaattttgctatttcctgcttactgagcagtggccccctcctgggaaaacagagttatttcagccagtgttcagactccatcttgcatacgtctctgtggaatattaatagtgctactgagatatattcatcatcttttctctgcttttgctgtctttatagcccagtgaaatttatatttggtgtttgtaggaaggctatcagaagctacttggacatcaaacttttaaactataaataatgatggcaagactgctaggatatctttccacagttaaacccattcaacagagtttcgttcttatgacagtgcaaattaaactagaataaaattagtgtgattttaggacagttttaaagtgaacatatttccctccctcccttcccatctacatatcaaggagacactccagactgcacttttatttaaattgcggccatcagaaaataccgtgagaaggtagtgtgtaggtaatggttcagttagcattgaccccagaaaatggaaaaccaagagcaagtcacttttaaagtgaagcaatagattttgaatatggattgttccaactcaccacttcccgaccacaacacaagagtatttcactgtaaattaagagtctaagttaaccacagctgtggtataactctgagaatgttttctctacatgtagacaattctggatccttccgtggtgcccgttaccctggtctttaacttttgtcctttgcaggggaggggtcaatgccttcttatttccttgctctttagaattctccaccagagggaggacaagggaaggagtaggtttcacgcgcagttctgagtaaagtttgaatctgagaaaccccacattcacgaattaaggatctccagttctgtgtctttattctacccctccctgcctgcttttccactcggcagaactgagtgactttcagcggctgcagtaattttaattattctgagtcgtgctccgaactatgttttttatcagttcctctgaaaattaagttgtagtaagagacgtagtttaagggcacccccttagaagaggccaggttattttttaaggaaaagctgaagatttctaacaggcacttactaaacacacacacacacacacacacacacacacacacacgcacacggcgcagacccagcaggagagcgcaacctagcatctttaaggttcgcttagcccttcctgtgcacctggaaggaagccttatcttaaactcccttccacctagagtttattttcgcctgcgtgcgacagggcttttgtacttaagtgagttaaggaatgaaccccgaactcttctgggaaagccaccaacgttccccccgcacccctcccagggttcctgaccacggagactctgcttggggcacaggtgtgggagtcgcaaacttttctctgcgccgtccttttccgcgtggaatgggacggagcagccctcccaggcgctgcctggctgcggaggggagcgggcagcgagagcctcgggtctccgcctgggttcccgggtctccggggcgctggcctcggtctccgcgcagcgtccagcgacccctgtcgggggttcccggcagccgcgccgccaccccccgcccggccagcgcgggaggaaaaggggctgcgcccgggagcgccgagcccaggctcctcccggtggcgtgtccgcgcctcggggtgggggtgtggtggggaagagggagggggcgaggccaggggagggtgcgaaggaggcgcctgcctccaacctgcgggcgggaggtgggtggctgcggggcaattgaaaaagagccggcgaggagttccccgaaacttgttggaactccgggctcgcgcggaggccaggagctgagcggcggcggctgccggacgatgggagcgtgagcaggacggtgataacctctccccgatcgggttgcgagggcgccgggcagaggccaggacgcgagccgccagcggtgggacccatcgacgacttcccggggcgacaggagcagccccgagagccagggcgagcgcccgttccaggtggccggaccgcccgccgcgtccgcgccgcgctccctgcaggcaacgggagacgcccccgcgcagcgcgagcgcctcagcgcggccgctcgctctccccctcgagggacaaacttttcccaaacccgatccgagcccttggaccaaactcgcctgcgccgagagccgtccgcgtagagcgctccgtctccggcgagatgtccgagcgcaaagaaggcagaggcaaagggaagggcaagaagaaggagcgaggctccggcaagaagccggagtccgcggcgggcagccagagcccaggtgggtgcgcagcgcggcccgggccccacgatcctcctcctgctcctcctactcctcctcctcctcggatgccgtggcctctccctccccctctccctcgcccgtcctcttcgccctgcgctctgagcgcccgttgagtcgcgcggtgcttcccctcctgggggccgccgctcacctgggcgccgagtcctaccgggcgcctacgcccagagctcagggcaagggacagcagtcccggccgcaccctcccagagtcccgggagcgcttcgctccctggcacggcccctccccagcgccttagcggctgagcccagcccgggagtgggacctgggctataggagtcgaggctgcgtgcgcgcgtgccccgcgccataagcgctttgcacgggggccgtgtgccctctagcgggaaacgctggaatgggccgcctggagggagagccggtcccctcggtgtgcctggcagcgcagaagtgggtggtcgagcaagaggccgcgtgggaagttagcttcggcgttttggggcacagggcaagcgatgtagagtgcgcgccggttcatcttgattcagtcctgtgctacggagactcaagagcagcggcagggattcctaaaggtcagcgaagcagatgaaatctagtccagtgtcaggaatcagctctgccccaaacaagttctacaaacttttggcttaacagttctatttttcaagacctctgtgataaatatggataatttactttcccaagagatgtaagaaaacaaccgtttatctgaatttttgaacccaattgtttgctggttatctatataataaaatggcaattgaagctttctagaaacaaatcttgtatttcatcatcagaacacgagcatgaacaaaagctttaccttagatgtccctaggaagcgctgatgctttggacattaccttggacaaaagaggcatgtcgaataaatacttgtttatgagtgattggtaggtagctgataaaagaggggaggaaggagatgggggagaatttattttttgcctctgcaattcccaattattaattgatccagatgccttaagtcgcttcgagcgtacccccaacacacatttcatgaagcacttctgcagaattaattcactagtacttgataatactgtggctacagtaatactgtagaagtatttgtcccttgctggaagaaaacaaaccacatttgcttggtcttcttactggtatcactgatagcatttcagaacctgggttattggcagagaccttcagcagagttttgagcaaaacagaaattgaacagagagtaattgtttcaccactggccattcttgtgcttgcttctttaataagatcctgctgatcatattcacttcaattactgatcattgcccctcatgagggtgtattgaattttcccttatttttaccctatattttggggagagaccatagcactttattcaacaagataggaaattggggagctggattagttacctccctgcgtgactttgtctactgtcctttctaaggtcatcatagtacattacggagatttcagacctagctcaaatcgttgtaaagagttattttgggggctcttatcactgtttgtggttgtgttctcctgtctccctgctcattggcttcagaagaagtttctgtggtcctctgtagatggtctaatgaattaagaaggggccagcggtctgaagtagcatcctgttcaggtaataggtgtgcattttgtcaagggctcccagcagcagtaccgtaacacagcaacttgacaagttcagtgggggaggggcaggcatttctgtgccctccagatctcatctactaggtaggcagctgtcttgtgattagctacgctctcttgacacagagcaccagagcttccttggtggctctcatctgctttccagtggtacagcagtgattccctgtaaaccagctaagtcagtatctttaagtgacatttgcttaactgtcttccctgaaaaattggggtgaatttggctgtaggttagtttttagtatatttgtctctgttttccaccagattataatcttttttggggagggactttttacccccttcgaagcatcttgtgctttttaaaccagataagaatatgtattctttatttgattcagaaagaatggtcaacaacttgaaaccagctttatatagaagcacatggcattaaatacaatgcttcagaatcagtgtttctttccttctttgtcattttccttataatggtaagtgccagtgtagttttccttgtcttaggagaattcatacctgatgactataatggtttgtgagaaaaacccacactctaggtttcaggcattcccaaaggaacgacctatagatgccataactctagtattcacacttgccgtgccagcccaaattaggacttaggaggacaagtttctcttgtattgctcccatcttagtgcctgtcagttccaagtttcactcctttcttaaaacagccactgcaactgtctgtccttgatgatatgtatgcaatagccaagcctctcttcagctgttttaacattgcctcatgacagtcaggggagagataatggggtgggatctcagccactcagccccgctgtgtgctatattgtacgcataggcataaacacatctgttggagggaaattttcagggggaaaaggcttctttaactttcatatggcatgagtgactgatatgcgatacatacatggctatttcagagcatctgcacttttatacaattaactaaatgttgaattgcacactattggggctgcagatgttcaacacaattatctattccataataatagctctaataggtcccaagcccttggagtcattgattccttttctttgctcaaaataagcaagctaagaatagtcttgggtgctgtatcactgatccacgtaccaagagccctgtaacagcctgggtctccttggtgctggacctcccatatccagcctcttcatactgattcagctcaacagactttttctcttgaagcctgaattacaaaaccagagcttttttttttttttttttttgacggagtctcgctctgtcgccaggctggagtgcagtgggtgcaatctcggctcactgcaacctctgcctcctgggttcaagtgattcccctgcctcagacttttgagtagctgggactacaggtgtgcgccaccatgcccagctaatttttgtatttttagtagagacagggtttcaccatgttggccaggatggtgtcgatctcttgacctcgcaatccacatgcctcggcctcccaaagtgctgggattacgggcatgagccacggcgcttggccgctttttttttttttttttttaatttttggccaattggtatttgactctaagcttcctttgtgattctctgtcgatatgttgttcttactctgcacctctgcacggaattctgtcttttttctttttcctcttaaataacctgggaaaaattcactatcatgcctagccagattctagaactatcctgtctcccttcactcctggtaggaggggcatttgtgagtctgggtgatggaaacattgagaaacctagtatcccaaataggtagaagcaggctgtgtgtttccccaatgacatcacccacctgtttccctcactaagtggctctgcaggctgaagtgcttgtaaacattcttgcgtataaagtaccctgaccctaacggggcagcctgtgtttacagaacaagaggaatgtccagtgatctgtttcaacctggttacttgtaaccacctagcctatgtaattattaaaaacattaaagattattcacagaatgaaataggacttattttgcagaattaaaatagcaggaagagcggaagaaagttgtatattcagacatgaatacttctcatacccatgaaatggtcagataacactaatgaaaaagaggagaaaaaatatatatagagaaccaaaaaatattagacaaacatgaacactgaatacctactacatgccaggcactgtgctggacacttttatgtttattaatgagggacctgctatttattgaattcttaccatgttccaggcagtaaaacagatgtatattgtgtattttgtcatccgtcctttcgaaaataagaaaattccttgctattaggcagcaagatgccagatggcctagtccttagctcttcagccagattgcctgggtttaaatcctaattaggctgttccttaaatatgtagtcatgggaaagttacttaatctttctgtgcctaaatttcctttttctgcaatatggggataataatactattattattatcatgagggtttcatgaagcttaaaggaaataatccatgaaaagcactctgaacatcaaccaacatgtaataagtgcccagtaatattagctgtctttataaaactacttaagaaatgaattatctgtgtctttgcaaagatatttgatataatttccaaaatttaccttttatggtaaaaaatatccaaagctgacctcagattacagtggttataaatattaatatgtactacctgtaaaactagagaaaagtggataagagtgtcaaattccataactgcatatatacattatgaaaacagtactgaactcaatctaaatattgaaagtagagtgaggtgcaacataattttatctctggcagaaaaatgttgaggtttcaagctatgagaagattttgaaacatgactcttttttctggcaacacttaagagttgatgcttaaacctcactttattgtatagaatacataatcttctcttttgggactcgtataaattgcagcaattgaaaaacaaaagtgtgcaccaacctgcccctcactatctttttatcaagcataacagtatattgccagcaatgttcatagaattgagtgcaggtgtttctaaatataaacaaaataaggaatatattaaattcacatttctagttttttatttcctcctcagccttcctagaatggctataggtagtgtttaaagttctggaagtgtgatagattcttaccaaatcaatgttctgttagcattctccaagtaacaagttaaattggatttgaacagtactgatagtttatcatgttctgttaggatagatgaaaacaaaccaaatgccagtattttgggtgagtcactttatttgctcaaagacgcaaatgaatgaacttctggtagtttagttaaccctggagctccccctcttgacaaatagaaaaaacaaaaaaataaatcagatagtattagcttgaaaacggatttcttttacccagataaaaaatatgccactaaggtacatacaatgaagttttcttgaaggaactaatgatattttggatttctcctaattttgtgcatgtctgcacttgtgtgtgtccttgtgtatgttttaatgggttaaaaaaaaaagcgagctaccaaaataccaatagatgtcagtgtttgtcgctttagaaaaagtgaggtgttagaaaaaaagaagaaatggacagctttatttatttttggttttactaaacataaagctggctacttttcaacaattgactaataattcactgtatataaccctgtttacaaaagtacattttattaaggaaaatattccatgttctcatctttcttctaaatttttttaaaaaagcctctgcagtaaattcccaaaagaattcagaatgtaggcagaaaatatgttaattttttaaaattaggaaacaaaattatttgagaatgtcgttaacacattagatttcttttgcatttttaaactagaaattagatatgcactttcttatgttgccctgattatgactgataaagtgcatttttcagtccaagtcaagtgagatctgtggagttctgcctctacataagagcagagatgatcagaattctcttcattcttcctatgccccatgtcacctttttctggcctccagagggtgctccaggagcatcacactgctattccccaaagactgcttttttcttctctctctctctctttttttttttaagttactgcagtattctgggcaatctactggaagaacagagtcccgattccatacatgttagctgcctcaactggagtttgttttccagctggaccacatagccctaattcattaagtattctaaattagaatattttaaaacattattctgatgatgttgatgcagtggttagcttgcaaggggacatctgtcagattaattccctctaggaatttcccccaagagaatcaagcatctttaaataccttccaatcacgccttacaacagctccctcccactgaagtgcacatggtacccacaaagagatttagtgctatttaagagtttcactctggcattggaaaactataggtgaaagcatcaaagttggacaacagatctttactaacacatttgttttcatctcttcctatctctctgtttcctcaacccaggggcaacaaatgtttaggagccccactttgattgagtgcacatttttgaacacaggtttgagtgactaattcttgtggatcatgggctgattttatttatgtactttttttgagacggagtctcactgtgtcacccaggctggagtgcagtggtgccatctcgactcactgcaagctccgcctcccgggttcacgccattctcctgcctcagcctcccgagtagctgggactacaggcgcccaccaccacgcccggctgattttttgtatttctagtagagacggggtttcaccgtgttagccaggatggtctccatctcctgacctcgtgatccgcccgccttggcctcccaaagtgctgggattacaggcgtgagccaccgcgcccggcggggctgatattttaatatggtcacacaggccttgttatttatggtttacctgcttatgttaattccaccctgtacttgttatctttgacatgagttactctcaggatattactccccttccctttttaaagtgtaatattgttcccattgtttcttgctccaagaaatctgtcgttgatgggaatagtctttgactgccacagtgccccgaacctttcattccacagctttgatgggcagggagctgccttctctgggcagctgtggagttttactttcaatgatatgagagtcacagaatgttttattagattgaatcatatgaaattgtcagttttgtaggtcatacctggctgaatattgtccatgtcatacagtttaatatttggactttgaaaaagtaatttgactttacttattctttacatattctttaagtaataatgacaactttgaaaaagaattatgtacgtttttgataattaaataggattgaagtaatacataaaagaaatctgagctagggataattgaagcagtaacattttttacaaccaataaatcagctaaaatcatatccatattaaatgaatttagcataaaattagaatgacagagcaactagcattttcccttggtgagaaaagtagtaagtttccaccataaaatatgactcatttttatttgacctattagcagatagttgttattgcaccttatcttaaccaccattatttctacagagagattacagagcaatgagtaggaaatatggaagattgctgaataatcctggctttagttatggagtaatatgaaaaaaggaaaagaaaaccttttgttcactttcacagtactacatcaatgcaagctttttagtagttttaatgtatgaattttatcatcaggtgaaaatgcatctcattattagatggcctattttataaataaagttcaaatttcgatatagccagtttttaaaactgtatatgtttataactcatccctttgttgcatataatctcccaattttagagacttacattgcatttttaaaggatagcacagtctctttagcaatcccacagggaatctaaaaccagcctttacaaggagatgtcaaaattccaatttgcagtgatatttttgtcaaaacaagtaacgtgtgttattacgtatagtaagttaacacaatttttcatttgtgtatcaagtaggcattggtttttgttttttggtttttggttttttttgagactaagtcttgctctgtcacccaggctggagtgcagtggtgcgatctcagctcactgcaagctccccccactgggttcatgccattctcctgcctcagcctcccaagtagctgagactacaggcgcctgccaccacacccagctaatttttttcgtatttttagtagagacggtgtttcactgtgttagccaggatggtctcgatctcctgaccttgtgattaacccacctcggcctcccaaagtgctgggattacaggcatgagccactgcgcccagcaagtaggcattgtttttgtgtgtacgtatcaaatctgtttttatatcttttggtattttatctcttttctgccaacagggtgaaatggaagtacagtattgggattatgcacaacattttattgtttaaaattatagtattccttttccattctgttgtttcagttgtttaaaaataagtaacaaaagagaggggtctgtcttgaagcccatgagatggtagatctttagaaacagttataatagcagtcatattgaaactgattgtcatctatttctgggaaaaatattgaaggctggtatattgtccccagaaggattagatgaaatacagaaaatagattatgattataattttttttagtgaggtcaccttgctgtagagttggaaccttcccgggggattgctcatgcattatccattttgggaaagagtaatacttacaggcattatggaaatgagcgggtaggtttgtcaagaggaaaccaataatttgaatactgagttgaatggaaaatgaaatacatgattttccatatattaaattgaatagaaatgggagacttatgtcttgagggtttttcttttctttttttgaaacatgttgatgatattgtgtgttcccaagtgccctcaacctgacaggaaggagaaatgtcaatagaaatagttacttattatattttgatatttagaaaggaacagtggagttttaaatgttgtgcatatcatttatgccccatccaaaaggatagcgatccacttaaaagaaggcagaaaagacaaggaccgctatcgttctccaggaatcaacagaagctaagggagagcgtagagtatagtccctgtggcctctacggagtcatcgccttctcagactgaatccacacaaggccgccttgactgaaagagcctctacattggactgtgcatggcgtggggaaatgtgattacttgcaatatgctactgattacagaataaatattatgcattcggttttcactaaacttaaaaagcccagtgaaaaccccacttctgcatgtggtgaatgtggttatgctgtgtcaggtgaagacatgtttcagtgccttcgtttactttccattaagatatgctgatttccttctcccttatgaaatagaaaaggaaggacataaccatcctgctgctctgccctgagtgcaccagtataggaataaaactctgtaaacagagggtggtggcaaccatctaacagggacctgcatttggacctgtgtgtttgggagagccgcaaagtggctgtgcctctgatatcacaggactctatgaaagaggcaaccaaagaagacctgaggctcttcttgtcattttagatatgtgatttcataaagttactcttgaccttaatgcagatggccatttgggatttgtgtctgtgcatttcatccacagctggatggcatagttgctgagtaatcctgttgctctggagcaatgtaagttacagctgtggccaggcacgtggctcatgcctgtaatcccaacactttgggaagccaaagtgggagatctcttgaactcagggattcaagaccagcctgggcaacacaggagtcctcatctctactaaaaatccaaaaagttagccgggcaaggtggcatgtgcctgtggtccagctgttaaggagggtgagatgggaggatcacttgagcccaggaggttgaggctgtggtgggcaattatgatacaccactgcactccagtttaggtgacagtgtaagacttgtctcagcgaaaaaaaaaaaaaaaaaaaaagttaacaaccatatcaaaagaacaatttattcaccccccaaattgtcttggaattctcacattaatttacagagagaaataaccctttggaaaattcacaatgttttgctagtattagtatgtcatctcactctaaaatgtaaaaaaaaaaaaaaaaaatcactactcagaccttataagaatctggtttttgattatgaatacagcaattcttttttgaaaactcccttgacaaattaagccaatggtggacattctaataattgtcatattttatggtacatttgtaactaaaagcctcttctttgggtaatgactgatagtttcatggaagaagtcattctttttctggtcactctagaaaataagaaatgggaaatgattgtatgtgatatacatatgcatggttctaagtaccaaatttgcagattgcctgaaaatgttcttatgtactttttatggatacaggctttcttttcaattagattcaaaaagtatcaatacattattatactttaaattgactagagctaccttttaaatggtcagataggttttctttttaaagaattacttttgtgattactagccacctgaaatggtgtttcaaggccatgcatggtgcctcatacttgtattcccagcactttgaggggctgaggtgggagcatcgcttgagctcgagttcaagaccagcctgggcaacatggcaaaaatctgtctctacaaaaaaatacaaaaaaaaaaaagaaagaaaaagaaaaaccattagccaggcatggtgggatgcacctgtagtcccatctacttgggaggctgaggcagaaggatcacttgagctctcagaggttgcagtgagctggaatcgtgacaccacactccaggctgggtgacagagtgagaccctgtgtcaaaataaaataaaataagatataaatgaaatagtattttcaagacttggtataaatgcatagctgttaagctgtaaggacatcaataaatgttcataaataggtaactttctacattctatcaccttattttctataatacagaaaatatactttaaattattttatttatctgagtccttttattctttttgcttttttttttgtttgcaagaccaaagtcagagcaatttcaattctattttgagcattttattttggcactcatgtattttaattaaaaaaaataaataaaccattgtcctcagccagaagaattttctgctgagtggtcataaatgcagagtttagcatttcacatctctagaatgtaaaagccacaaagtcatatctgtcttttatgttgtcatatcaccaggtgccatcatggtgctgagaacatagtctttgtttttaagaatttattcagtaactgactgaatgaggaagtatggctagtttgcttaagacattgagttgtaggagttgatgggtagcagtttagttattatgctactgtcagttaataagaaagtatgagtgcaattcagcagtatcagtgatgcatggatttgttcctaaattgttatttttgtggttgaaatttgcactgtttattttgaagctctctgtgtaagtcataatcagtgcttaattattcagactaatgaattggaattagaggtttgctcagtccacaattcttgctaccattaaaatattttgttacatttgtttttgagtacatagaagcaactaagaaatggattaagatgctgcagttaatctttgtaaattactatggccattgcctggcacctaatgtttgctatgttaagagtttgttatatgaataaacgaccgctgttcctggtaggtaatgaaagtaatcttaaacaatattagtactgcctaaaaagtaaggtcttaaatataactacagtagtcctgagaaaaatcatagagtgttagaactgaaaaggttgtcttagaggtcatctgctcgaatctcatctttttagttgaggaaaaccacaaggtacaaacaacaagggcatcaatcctagcactagaacccagatctccagatttcagggtaaggattttaattattaccatgctatactttcagtctcaagatggcactatatatgaattcagcttcacttttatagtgctttgggtgttattatgcttccagataagagagatgtatttctgtgccattgaggaatagcttagagtacctatgattcataggaatttgaaggctgtaaatcaaccgaatctttatatctttttgttccttcttgcagtatcttgtacccaagtagcttcaataaattttgactgacaagatgaccataaaataagtagtcctaatgtcataacatggaaaaggagggtaatgggtgtgtgtgtgaatgtgaattagtatagtatagtaatgagctgcctcagcgctcttaaactttttttagcaccaatgcctttatgcaggaaactctgaaaacaagcaagagatctttgtgggctctctgtaaattatgtgcatgcaaaaaagcatcctcagtgcttgtcccttgacagctgctctgagaccactgagtcactcgcttgcatctgtgagccactgaccagtcactgattgcagtgacagtttatcactaacaacctgaattatctttgacccagagacccaggggtcaaaggcctcctagtccattattaaatttccagggcagtagttcagtttgcattaggggatttgtttatatttatttatttagggtttttggggggtggggggtggaggagcttgggggaatgagacctgcagttattttccccacattataagattatttagtcctttatttgtgggatttggcatcctaaaagaaaggaagactcaaagtattgtggttctggtctgggcctcacatgggtgtcctaaagatttctgggacccatttatgggaagaatgccactctacagattatagcagggaggagctttgccctcaggaagacacagatcctttgagggtggtagagactcctaaagtctgctgattcatacccagctggccccattaacaagagaattaaagagtggctagaaagggactgaagagttcactgggggcccatccaaaaagctgggggtacagacaactgctgattcccagccagtcatggattttattttgagacaggtctcgtttggtcgcccaggctggagtgcaatagtgtgatcatagctcactgtagcctgggactcctgggctctagtgatcctcccaccttaacctcccaagtagctgggactacaggcatataccaccatgctcggttattttttttttaattttgtagagatggggtcttgctatgctgcccaagctggtctagaacttctgggctcaaggagtccttccaccttggcctcccaaagtgctgggattataggcatgaaccactgtgcctggcttgccagtgatggattcaaagtcgcctctgggttgtaaccaggaagcatgcctgggccagactgagagggctgaaggatgacggcatggtttcagtgtgtgagtgtgcatgtatgtacgtgtgtgtgagaatgtgggtaagtgtgtgagcctgtaaaagtgtatcatgagtagctgtctcttgggaggagagggaatcaggaaccttggtcaaataacaccatgtactggcatggaaaggcactgttctgggcagcagtcaagaagacagaggaggactaactgtatatgatttgggcaatcatttaaagtatctgggatttatttccttgtctaataattagcaaggttgatgtagatgaggtataacaactttaggggtagaagaaagctatgattcaaagtcggcattttattagatcagtggtctctgatttggtgtgatgtgttcctggtatgttttcgcttagaacaaggttgtttaacccatggcccatgggcttcatgcatcctaggacagctttgaatgtggcccaacacaaatttgtaaactttcttaaaacattatgagcttttttgtgattattttttccagttcatcagctgtcattagtgttagtgtattttatatgtggcccaagataattcttcttccaatgtggcccagggaagccaaaatattggctcacttagagtctttagtagtgactatgtttttagaaagcctaaggtatttgaagaataatagtcacataaagtctaggcaaatagcaaatttgttttatgtaggaaacagcttatcttctatagaataacttttgatgggtgaaattgtagtgttaatttatcttagtgaacacctagaagatttgtttaggtatgtgaattgtttagtgaaaatgtagaagatggtaagtatatttgggaattactagtgcagaagccttttattaaattctcaatagaaactgggtactggttatgaattgtgatctctcagatacctttaacttagtcgtctctcatgagtatgtgatacaattgaagttgtgggatttaacctctgctgagcagcagaaagatatgaagcagtggaaaatacaggctaaacagagcctttcagaataatttttcctcagtggtttatgttcttcacattcagtttttattcttctccatccttaactttctatagctgatacttccattttggatataggctctgtttcatttccagaggtatctctttccctaaactcatcaagtactttttcaaccttgttgatcatcttaacagaagaatcgtaacattaagttgatttatgacaccatatctctgtagtaactctgaattgtcatcaagctattcattgaaaggatacctcttaaactttctattactaagatccccaaatgtatctattctcctctcgataaaatgagtattgtcttagacaagcagcagactgctttttaagtgaagtggattaagctgctgtgatcgtccctgtgaatgtgtatgataaatcattttgatggcctttttaaatcagagtcaccgagtcccacacagagaaacagagaatgctgtctgtcattattacaataataattaagcgttggctgataggatataaagtataaatcaaagatcttagaggaaatagatgaaagaaaagctttgtttctcaaaaacttaatctaaaagaagaaatattgagcaagcattgggtgcttcatgaatggcctaaaaatatatttaagtctatcacctggaggttcgttcatttattgccaggaaagaatcaatcccacttttttttctctttccctgtggctcaactccaggaaggtgttttaattgattggtgggaagattttaacacagacaaaacttataagctaagcatcattatttctagtacagtggcttcaccacattatagggtaataaagttaaaagctgccgattgtttcagaattattttcagaaatttacatcctctttattcctattaccttgagaaagagttcagagaatgggcttagtcagcatgcaattatggtattagataaagcatacagtttggtctaaaaccaagatgcagctagtctcatcagggtactttaatcaatcaagggttgttaagaaggtaggaatgtcagtctaacttcattcctttgaaggtgatcagcctttcttctctggaggctttgaagattttgtcctatggctgggcgtggtggctcacgcttataatcccagcactttgggaggctgaggcaggaggattacttgagctcaggagtttgaaaccagcctgggcaacatagaaaaacaccatcttcctctccccactaccaaaaaaaaaagttagccagttataatggtgcacatgtgtagtaccagctacttgggaggctgaggtgggaggattgctggagcccaggagtttgagggtacagtgaaccatgatcatatcactgcactgcagccagggtgacagagaaagacccagtctcaaaaaaaaattgttctccaacaaatcttttttgaagttatggcatttaaccctgcccaccattcccattcccctgtcagtttcactatcatgcattcctttttctttatcccactcaggaccattgggcttgtcaaacatataaattggctttcaggaaaattcttctccatatctcttaaaaatttcctgtatcccattctcttccctctttttggaattttctttttctataatttaaagatagagtcttgctgttttctaggctgctctcaaactcctgacctcaagcgatccttctactttggcctcccagtgttgggattataggtgtgaaccattatgcccggtctagaactttaactaaaagtacgttggaccttctttctctgaacactggttctttttacttccctcacgtttcccatcattttgtttcactctcccgctgtatctcttttgaagttatcttccccttcactcattgactcttcagctatgtgcggtctgctgccaaaaccatccatgaagtttttcatttcaaggactgttttcccccctaaacctagcagttttatttggtgccttttcaaaccttctatgttgtattttatattttcaaggtccctgtagatatttttcaggttgttatttatttcttttagcagagtaagcctagttgtttcataatttctgtgtggtaatttcagtttgtgttggttctcactctctatgccttggttccttctgtgcttgatggttggtctctgaccctgtgttggccattgctctgtaaaaattatctgtgtcattcctcaaggcatgggatagaagcacattcctgccgagaaggtaagtgttactgctgggtacttggaaacttaccgagttcgtggcttgaggttctgtggcctaccagcctgtgcacacctaggcatgtagaaacctgtcggtagactcagcttttccctctggctgaactcaggatcaagacaatgtgtctggccggacacggtggctcatgcctgtaatcccagcactttgggaggccaaggagacgggtggatcacctgaggtcaggagttcgtgaccagcctgaccaacatggcgaaaccccatctctactaaaaatacaaaaattagccgggcctggtggtgggtgccaataatcccagctacttgggaggctgaggcaagagaattgcttgaacctgggagggggaggttgcagtgagccgagatcacaccacttcactccagccacagaacatctcaaaaaaaaaaaaaaaaagacagcatgtctttagttctctggggctaaatgggtatgtttagatttggtgtagcttttttggggttctttactccttttggggtcccagcttaatgtgaagagggtctactctaagactccccacttcaggaagatcctggagcctctatccctttctccaggatgagcaaatgcacttgaagaaaaagtagttgctttgtccaggtattttgcgtctatctctaaggtttgagatttgccttagaatttgtccaaaaaatgatcttttttgtcaaattcttttaaggtgatgtttattatatttcattcagcacttttaattgtttccagccaggaggttcttgtgagaaacttaccttccaggaatggaagaggaatcattagtcattaaggagctaaaaatgttaggaaaatattaatgcttcagaaacaatttgttgatctgaagagtacctaagttagggattttcagaaagtagcattttgttttgttttgttttgttttgtttgagacatggtcttgctctgtggcccaggctgaaatgcagtggcgcgatctcagctcactacaacctccacaaacgattctgttgcctcagcctcctgagtagctgggattataagcaggcaccaccacacccggctaatttttgtatttttcgtagagacggggtttcaccatattggccaggctggtcttgaactcctggcctcaagtgcccacctcggcctcccaaagtgctgggattacaggcatgagccactgcacctggccagtagcattctttggatgaattgactctggttttgttagccttcagaatctaaggaagtttatatctggtcaattttgagaaagaagatctctaagaaatgcctcaagtggggaagggatggactttataaaccaaaatgtcaatgtgttaatcctaaatatctcaatgaaatggggcaaaatatggctaagaaaaatttgacaaggtgtaaatctcactgaatgcagttgctgtggttgctaccaagtttacaagagaagaaaccaggttttgccaatgcatcaaaaattagattaaaaaagaaatttctctggcctagtctgatgcttagccttcaagagtaaaatgatgtgttgttagatgacttgaccaaagtcccatagccaaggcagggagagtgttgcagcctggtggtccattatctgatgccactggatctatgtagatgagtttggaacttcactttctgccttgtctgggacgtaaaaactttgggtgcccctcacttcttttttatataaactgttgtgttttattgccctggcactcttaagttgctgtttcaccctagcagtgcctgcttcaagccatcaccaatgaaagtgcctttgaagtgtcttaaggcgtgtgcattgcctagacaaatagttggcagaagaggtcaacacaagcgtctttgctttggagtgtcaattgaagaaattgtttttccacttgaattggcagtgtgtgctcttactgctgttagagttctgggcagagaagtagatgtgataattatgaagggagaagggggaagaacagctgcagaatgcagggaagtgactggactccagtaatcatatttggcaggtcaagggtgagatttagcctgatgggatttggaccattccctgggctagaaagtagtgttaaaatcaactccaggtgtttccgttattcttaaggcctaagtattattaaagcagaaaataatatggttaggatatgaatgggaggggattggtcattcgctgcttgggaatcacttatttgcaatagagctcattctctcttgacagttgctcctacatgtctaaaatacaccataaatctcgaagtgctcgtttcaatattgaagtttcctccaagtgagctgttatcacttttgtcttcaagagaatgctaactcactgaatctctttgagctttttatgctttacactgtggattttggagtttgctttggtttttccactagttctttaagttaaatttaggtaaagaaatttaaaatcatcaggcttattcttaaaaactcaagtattatcaaatgatggatgatagagatatgctttgggaatatatccaagtacttcaaatgatagaagttagaacaccaggagacatttagtaagagattcttctgctgggtgaaatcaacatcaacatcacctggaaactcgtgggtagtgcaaatcccctggcctcaccccagagctcctggaatgaagctgtccgggatagggcccggcatcctgtgttttaataagctgtttgtgggattctaatgttcgccaaagttttaggatcatgcctgcagagaatcctgctcactatgaaagtttgcatgcctgagtaagtcaaaagagatctttgaaaatagtatctaggtttgagagacttgctgtgattgtataattttagcaaatgtgtcaaaacaaatttttacttgcaggcaatatcttgttagtacagagaaataaaacaaacaaacaaagattataaataagaacaaaagtaattcatccaagagccatgtgaaaatgaaaatccttgaaatggaaaaaaaaaaaaaagtttttcagactaccctgtggaagtagtaagttacattgaaaggccgaaatcagccaagatcattttttgttgttttgttttttgttttttgagacagcatctcgctctgtcactcaggctggagtgcagtggtacgattttgactcattgcaacctctgcctcccaaattcaagcaattctcctgcctcaggctcccaagtagctaagattacaggcgcacaccaccacacctggctaatttttgaattttttgcagagaggggttttgccatgttggccaggctggtcttgagctcttgacttcaactgatccgcccaccttggcctcccaaagtgctgggattacaggcatgagccaccgtgcctggccaggccaagatgattcttgaagtgtgtgtgctgtgcgtactgtgtgtgcatgtatacgtacatttctgatggttcactttagtgatactgtagttcagtttatctgggattgcctcagtagaaagctatactcttacttgtttaactttctgtctattttctcctttaaaaaagaaaagattatatagtagacttatacttggtatctgtctgaaaaaaattatatgaaaactgtctttattgccagggaagcacttgtactttcttttctcatttattcttttctgcactttaatattacagtttatttgcttctggctttctttcataatttatcagaaatacaggcttgtatagaaatcaccattttttaaataaaattttatttttattaaattattgtgagctcattgttttttaaaacaatcatacacaagtaaaacatttaccttgggggtgggcatcagttccttttcccatccgttttcatctctagttttctttcctaaaaacaagccctctcaacaattctagttaattctttttctgatagttatcttttttttttttttttttttgagatggagtcttgctctgtctcccaggctggagtgcagtggcgcgatcttggctcactgcaacctctgcctcctgggttcaaccagttctcctgcctcagcctcctgagtagctgggattacaggcacacaccatcacgcctggctaatttttgtatttttagtagagacgggatttttaccatgttggccaggctggtctcggactcctgacctcaggtgatccgcccaccttggcctcccaaagtgctgggattacaggcgtgagccactgctcctggcctctgatatttatctttatattttctatataacatgcatgttctgctgtttcttttttaaaaaccttttattttaggtcttataggaagcttgtgcattcatttattcaacacataattattaagtacctaatacattctgtacattgtgctaggttctggaaataaacagagaatagaacagacatgattcttatccatggagagcttatattctaaagatgctaggaagtacttttaaataaaactctgacttatatataaaaacttcagaaaagaaagggcctgcttttaaatattttttttggtgttgtccactacttgaacttcatcaagttcatcagaaaaaatttaaatggtatttctaaataagtggtttgctccactctatcattaagcttgttaagatgaataaaaatcagaatattttcaaatgtatgtaaatacatacattcagtgtatttcccagcttcagaaagtcctaatttctgaaagtccttgttatcaactcttgttttgaaaggaccctttctttaagataaagtgtcacatacattattttgtattgatacaaattattgatgattatggatattttaggtaatcaatactaagataattatgttaatatgaattatgattatagggtattggtaacagacaggagtgtaggtgaatgatatgaatttgcactgagtttgtcatgcccagaaagttaatctgagccaaatttctaaaaagtgccttccttattccatattatgtatgaaagaagagcatagtttatgtgtgaatatatgggcaacatgtatatagatgtccacatgaactgcgcctggttaggtcctagaaaagcctatggtgggaaaggtgggttaagaggattgaagttaggagtgaacttgttatagtcttcataaatatttttatagccagtaacataaaacaataaagacagtgctccaaattaaagatacagcaatgacatgacatctacatttgaaactagtaataatggatgccgggccctattactaatttctgcttagcattccttactcaccagaaatgttttaggatcttagttcctttgcagcttgggatgcttgtaaattcacttgttcttttataaataatgtgcatacaaggagattttcaacagcattttcttatcaaaggtctgggcctatagtcaaatagtcaatgccatcgtggttttacagcacccatgaggaggtgttgacgttcaggttttagcttcaggattttgacttgtgtcttcttcctgcttgggtcctgtctcttcccacctccccagctcagccttcatgtacgaattttagattcttttgccttcgtatcagccagcagaagctagttttttgttttgttttgtttttttcaaggcctaggtttccttttactcacatctttcttcaagctttatttgcaaacacctccattcctcttgccattacttttgcttcatgtctatttcaaaactctgtttcatctttttcttgttactaccaataggagtaaattgagtgacttgcaattaaggtacaacagaagcagaattttcaaagttactcaaaaggaataggtagaaaaattcccatggtaagacaactcagtaaataattacatacaggcagtgaccatatatgctcattttaagttacaaatatacacacatggccataaaaatagtcagagactgagctggaactcaatccgtaaactgattccaaaccccatgtaatttttatacacagtttattgctagctttttgtccttttatgttcacttttatgtcctatcttctctatattcctaagttgcccacattttaaaatctgcctgtcttctgactttttaccacaagtgtttttttctcatccacttttattattctcatttcctgttttcaaagaaacaattgcaacacattttagaaatgcttacgacataagtggcacactcctgaagtctttccaaaatctattttcctccatgtcttaatttttgaaatttatatacttagcttctttctgctaattcccacagaaaaactcagcacaattttataagcaatgtgaatgatcttagagccctcataggaataaattgcacagaatgttatcaatatatcataagtgaggtacaggattaattttctaagatatcatttaaaatttcttctattgttactatacacatttgatttattaagccaaaacttcattcctctaagaataataatcccgtcacagttctaatcctagcatagtgtcgtcttaactgcaatgtactatcctaactttcaattacatcttatttcagctttctttattatacagtagctaaaaatcattgatagttataaagaccataatgccataacctctcaaatttaaacaggatagaatattttatgttactaatacagcaacagaggcattttcctctgttgggtagatgcaattattcagattccaagtggttgagacattccataattatgtctctaattttacattctacaggcctcatttcctctgtctgataactgtcctcacccaagggtttctacaaagtcacagtttgggtgaatctgtcatctcattttttcaaagaaggaaatcatcatcaaataaaattatacacaccaaataaataaatatcaaataatatattaatctacaaatttgcgacatatttattttctgactttgaggttaatttcgccaccatttttcctaatctgtatatcctatccccacttgcaaacaatgttttgcctgaaccgagtaatggcaacatttatcgtaagtatatcttagcttcttctccttatctgaatggggttctagttcccttagcattctcagataacattctgaatattctactctgtatatccagtttgttcatagacctcaaaatgcagaccctgcatggattattcccattctgctgtctgtctttatgaaacctgccaatacttattgctagatgaaattctacagatgttccatgatgacttattgactcgataacagggatctgcaaacatttctgtagagacccaactctgcagttgtagcacaaaagtagccacagacaatttatgagcaaatgaatgcaagtgtgctccaataaaactttatttacaaaaacagatggtaggcaggatttggcttatgagccgtattttgctgacctctgctctataatattccttgaagagatactattatcccaatatcctgacataaaatatatatccttaccatttgctgtagcaatattcaatttttctttacctggcgttgcttatgttctccagccagttctgtcttttcattaggaatctgagttaggatttcttagaactatgtatttgggtaagtttatcaaaggcctttttatttttattttttattttattattattatactttaagttttagggtacatgtgcacaatgtgcaggtttgttacatatgtatacatgtgccgtgttggtgtgctgcacccattaactcgtcatttagcattaggtatatctcctaatgctatccctccccgctcctcccaccccacaacagtccccggtatgtgaaattccccttcctgtgcccatgtgttctcattgttcaattcccacctatgagtgagaacatgcagtgtttggttttttgtccttgcgatagtttgctgagaatgatgatttccagcttcatccatgtccctacaaaggacatgaactcatcattttttatggctgcatagtattccatggtgtgtatgtgccacattttcttaatccagtctatcattgttggacatttgggttggtgccaagtctttgctattgtgaatagtgctgcaataaacatacatgtgcgtgtgtctttatagcagcatgaccttttaaagatcttaggagcataatgctgtaacctctcaaatttaaacaggatagaagattttatacattactaatctggttgggtagatgcaattattcaaattccaagtgggtgagacattccgtaattatgtctctaattttacattctccaggcctcatttccctctctcatttcatcaggtcttcaaaaggcttttaataaacttacccaaatatataattctaagaaatctcaaattcagtgcttgatcagatcactgtgtggtatagtttgtatatttttccccacccaaatctcatgttgaattgtaatctccaatattgggggtggggtctggtaggaggtgactggatcatgggggtggatttctcatgaatggtttagcaccattccttggtgctgtcctcatgataatgactaagatctggtcattttaaagtgtgtggtctctctctctttctcttgcttgctcgctcctgctttcaccatgtgatgtcccccactactcctttgccttccgtcatgattgaaagctccctgaggcttcaccagaagcctggcagatgccagcatcaggcttcttgtaaagcctgtagaactgtgggccagttaaacctcttttcttgataaattacccagtctcagttattttttacagcaatgcaagaatggcctaacacaatgtgtaatctttgtttcatagagtttacactacagctttgccacctaactctcctatgttagtacatagaatttctgaaccttcaatcctgttcagaatgccagattgtgagagaatcagttatgcttcaaccttgaaagcatggagttctctgctttcagggaactccagatgactcaggaacagaagtaaaccctagacaaatctaaagccaaacatagaataaagctgaacagcagatcataaatcccattccttgctccctaggaatacctcttcttctaactccagcttcagatttttccccaggtttcacaattgacctttgtcttagtgtccatactggttggacatacccctctggcatagacattcatgataggcattgccattcttcatgatatgtcattcttggctacttcctctttttctaggatgcatgttttagctcacttcatgttcaattgccttgtggttggcctacttcttctttctcttctttcctacttttgtggttgctttatagttgactaattactagttcatcggctctgcttattgcctaatactataaaagttcccttcctggaagggttggggatgggaaagtgggggtgggtggtagtaaaattaactaaactttgtagtgggctggagatagggcatgagtaaaggaaaagttgtattttaggactgctcaactgcatggatatttatactttttaagacaagcaacattaacaaagtctggatcttaaagtagagatctacactggagataataatatccctgtgggcatttaatgctcatggttacctagaaaataagtataaagtaggaaattttgagagagtattcttgtaaagattaaatggtgacaccaatgtaaggcttgaatgttctaataagggtgaaacttggtctgggaatggcagttcttacaccttttataattcttaactgttattttttagatctggtcatttaaatctgaggacccagatatgctagtcttatagaaagcacaaatttaaaatgggttctttgtcttacatagctctaaagtttaggaaaaaagtatcttcaagcaaccttcataggaattctccaaaataaatgtgttcctgattaatatgtgttttattttttaaaatttatttttaattaatttttaaattgacaaaattgtatgtatttatggtatacaacgtgatgttttgaaatatgcatacactgtggaatggctaaagcaagctatttagcatacgtgtcatcatctcacataccatttgtttgtggtgaggacatttaaaatctactctcttagcaattttcaaataatgtaattattttaaatcagttgtttaaatattatgaaattactttcagcccttagagaatagtccatctcacatgacacataaaaatggaaggaggtgtctagctcaggagaaactttttggaatatttgattctctttccctcattttctcttctttttttgttttttaaaaaataatttttaaaccctgtattgactcctggctattattttgaatatgagtgctaacaatttgagccttgtagataactatcccaatgccaattgaaccataattttcatttgtctctttctacaagattctgaattttttcagaagtgaaattaagtctcaattccctataatttacccagggcaataaatcttaaacattttttcttaaaaaaacaaaacaaaacatttttactggaaagactttatggggtggacattaactctgtaaatgccatataacttttggagagggctgcccctggcacagtgtaatatttatgagaaagttgtgcccatactaaccacctgtatgagaatcgcctgcgatgcttttgtttaaaaggcagattcttttttccctatatttttctctttttaaaaaaataatttcgacttatattttatatttatatttatattattttaaaaaataatttcaacttatattttatattcaacctacgtatgcaagtttgtcatatgagtgatattgcgtggtgctgaggtttagggtacgaatgatcccatcacccagatactgagcatagtacccaatagttggtttttcaactcctgttccctccttccctccctgctctagtagtccccagtgtctgtttttgccatctttatgtctatgagtatttgatgtttagctcctacttataagtgagagcatggagtatttggttttctgttcctgcattaattcgcttaggataatggcctccagctgcatccctgttgctacacaggatgcagtttcattcctttttatggctacatgatattccacagtgtgtatatactacatttcctcaatgcagtccaccactgatgggcacctaggttgattccatgtaaaagagcatattgttaggcttttctctgaattactgaatcagagtctttcaatgggttccatgaatatttcatattcattttagtaaacttgctcaagtgacttatgtatacagttataggtttgggaacctctggcctggggaagttgtctgcaacaccactgacaggtccctgtcctgccacagacatttctgctgtaactccatgcttgcattttttgggaaaaacaaagcaagacaaaacaaaactcattttgcaaaatgacacacaaaataaagaggcttctggaaaaagtagggctaggtgaagagaattcaaaacttacgaaactataaactgaacaccaacaagaataacaatgaacctaataaaaaactagcatagttatggctctaacaacatttattctcaacaacttagttaaatcgttgtacccttaaaccttaacactttttttttttgtttttcgagaccttggttcttgaggacattttcttctagcagaaatcagtattaacttctttatccatctctctcttttttttaaactgttatgtaccatcattatagcacttcttacaaaaatgaggagctgtctttgtaacttcatctgtgccatcagcttttccagatagtttaacataaaaggaagatgaagtggttctggaagcaagaaaaccagccaccacttgcagtaaggaaggcaggtctatgggcctattagctcatggaggtttttgtttgcttgtttgtttgtttttgagatggagtctcacacagtcgcctggtctggagtgcagtggctccatctgagctcacggcaacctctccctcccaggttcaagcgattctctagcctcagcctcctgagtagctgggattacaggcacctgccaccacgcccggataattttttgtatttttagtagagacaagatttcagtatgttggccaggctggtctggaatgcctgacctcgtgatccacccgcctcagccttccaaagtgctgagatcacaggcatgagccaccgtgcccggccagatctttttaaataagatcttcatgtgttataatactaaggttgtctctttaatcacaaaaagccagtcctttattgcttcaaattgttcatgtgctgatatcatatgtctattgaggtctgacttactacattaacacacgctggcagaaccactgcagacattctctgtcctccttttttttttttgtcactaacatgataaaattcttaagggtttgaattctcagaggtactgtctgatggttaaatcacagaggtccactgcattgctgatagatttttttttcaccacagtgctgacaatacaattgttcaggaatggccttcatgaccataaggttggtttgacctaggttcttaattgtgatgtctctatagcttttaacttatttcaggatgatttcccccattgcaaatagataattgttcaatagatttgctgcagacttttggacctgatctatagttttcccttgggatatgtaagatatttgaggtacaccaaagtaatgcaagaaatatctttctttagagctagagtttagacaggaagtatgtcatagaactatggtgtgtccttcccaagtgagggatttcattagaccttgacttagaattgaatgtaatgttaatctgtaaaggcttgttgtgagggttttgcttaaatttttaggtttattaaatttttaggtttattaaaattcctaaatgatgatatttttatcagcaaagacaaaaatactgctacttaagtagtagtcactagaaaaataatttattttgttttgttaccttaactgtcagatttaagcacattcctaccaatatttgggtttgggctctgaaacccaaaacttttgaaagctttggaaaattttgtagaagttctttcttctgtcttttttttttttttttttttttggatactattgccactgggatgcaagcattcataaattatgtttaaatataaaaattaggtcggtaactctctgctcgtggattcctgaaacacaatgtacaaaaacccagaatagatcttcgtggctcactttagagcgtaacagcactgggaggtgatctgacttttcattttacacgcaagaaactgaggctggagagaaagaagggttgtctgggtcacaactgttgaggtcagcctctgggattgaacttcatttcctgaattcctcatggttttccacctccattcctcagcttctgtgatccctttggtatggggctgtttcttgaaccttgaataggagggtatggaggtgaagtgacatgtgagctaattcttttacctcactctggtttatctatttttatgtactaaggtcctgtgtattaattaatgagatgagttccacagttgctaatattagaaaatcaacacaattgatttctccttgggaactgtattagttttctattgctcctgtaacaaattaccacaaactttgaggcttaaagcaacatgagttcatgaatttattatcttagagttttaaatgttagaattctgtgaggagtgtcactgggctaaaattgaagtgttggcagggctgcaggaggctctaggagagaaatcattttcttgcctttttcggcttctagaggggcttcccttcctcttacttccaagccaacaacatgacatctctgagtattcctctttaactgcaccaagggaagataatctccttttaaagattcacaccgttagattgggtgaacctggataatatagtcagcccttcctatgcatgagttttgtagctgctgataaggaggtcatctgtaagcaacttgaacatctatggattttggtatctgcaggggatcctggagccaatcccccacagttagtgaggaatgaccatatagcataatttccccatgttagtatccttaatctcaaggtctcaatcatatctgtgaagtcccttttgctgtgtaaggtaacatattcacaggttctggggatcaggatttaggatctttgggagccattattctgcctgctacaggaatgaatttgtttccacttgtctcaactctaagtgggcagttatttaaaaactttgtattaatttagagagcttcataaaatgctaaaattttctgagaacctaagtgataatataagaagaatagctaccaacatttgttgagtgcttgcaatgtgacacacactgactgctatgtgctttaattgcaatatcttatctaatcattttagtagccctatgagataggttctatttcatttacattttagaaaatgtaaaatgaggcttagagaatttaaataatttgtccaaggtcaaacaactagcatatgggagactaagacttgaaattgggtttgtctgacccaggcttttaatcagcatattgcactgtttatatgtagctctgaagtggtaaaattgtaacatagtgtaatgcagtactgagaatataatatcttagtaatttttaataaataagtgttttagtaaggaaaataagttgttattaggaataaacactttctaaatgacatagtacccattgagcagtgttcaactgattaatattagttggttatatactgatttagtgatcagttctcaaagcctcaatttaaatagaaaaggagttatgtggaatttaagtggaaaggatatagctactttaacaattttttgtgctctcagattgtaaagaggaaggatttattttacaaataaattgcttgtgaaagaaatttaattggttaataaagtctctatctcttgccccctaaccagaatgtcaactccaggagaacaaggatcttggttttcatactcaattctatatgtccagtacttaaaacagtgagagcaatgtaactgatgcacaatgatatttgttgaatcaatgggtactgacaaattcctaagggaataaagccagttatctacatgaataaggcaggatctagatactagctgcatgccagaagaagaatatagagcgttctaatgtgtttggctaggaacagaccatatcatgggctaatatgatagagtaataaaggtagtgataaccctgataaattcaatatgtttttacataaatcctgtgcattaaactagtagctcacttgatatggagtgtttgaatcacagattgactttgctcattcgttcttccattcagtcaacattattgagcactgtgctagttattaggataaaagatgcattaaaagaataaagcccctaacttccaggagcctctgtctcctaagtgaaacaaacatgtgtaaagataaaataccttatattaaatggaataataatggttttatagaaacatggaagagggatacttaacttattattcaaaagagacacttattcgaaagacataaattgagtttagtcatcttgagttttagaagaaataatttttgatttatggagggattgcaaatataggacagagagttctcctataccctttattcagctcgtttaataatacatagctttgctatattgatcaaaactaagaaattaacattggtacaatactattagctaaactgcagaccttacttggattgaaccatcttacagccttttgtgctaaagggaaattgtgtatgaaagtgctttgtaaacagtaggctaaatagtggtagtctaagaagtgccatctggtgagcccagggtaggtcactgagggtgaaagttgcattctctgaagggagctttaaataatctaaccatgaactctattttattttattttattttattttgttttgttttatttatttttgagacagggtcttgctctgtcacccagactggagtgcagtggcatggtttcagttcactgaagcctaaacctcctgggctcaagtgctctgcccatctcagcctccggagtagctgggaccataggcacatgccaccacacctgggtaatttttgtattttttgtaaagatgatgttttaccatgttgcccaggctggtctcaaactcctgggctcaagtgatctgcctacctcagcctcccaaagggctgggattacaggcgtgagacacggcgcccagcctgagctctctatattttagtttcctttaataacatgatcagttccacccatgaatttaattaattccttatgagtttgctattaaaataaaatgagcggttattgatgcttattgtgtgtgtgacagtatcctattcaaagtatgggatacagttctttgattctctcactccatcctgtggaaggtaaacttaccttgcagatgaggatgaagttcacctaggtaatagatggacttggccaagccatgagactttaggtgggaaaactggaatcagaacctgagccaacctgacttcaaagcccaagttttctcctttgtgttgtctcctgagtcattttcctgtatagccccgctgaataagcattttccaaattatattttgtattgtgcaaaacttcacttccttttttattcaaagactatgtatttcatgcttcaaggttttctgagaactgcagtattctgcaaattctcaaaaaatgcttttgctctttctaagatttcatgactttaaagaacagttactttcttcctggccttcctggtgtcagtctgtatgattctataatgtttagtgtattcctttatattggctgccctttcctttgagcatttcggtaacttttcttgatagtttccagctactttttttttctttttgtctctcaagaatgaccaaaagtatatgtagtttttcagatatttgtcatgtaatttcgtgccatctagatttatataacctaacattttctggctttttcttagatatttatagatggtggtggttaaatcagagttaataatattaatttttaaaatatgcaaaatgcttttattgctctttttaattaggtttttacaactgtattgaaataggtgtggcaggtgctatttcccctcctttttctgctcaagatgattgagattcagagtaattttgtgactgcttcatcctgcagaccaaacaagtactttacctaagtttcctgtctccattctttttgatagggtctatcaagcttgtggcaaaagctcaagatgttatgtgtagagttcagtaatttaaattcatggacttataaactattaacaaagaatctaattaaccttctttctaagtaaaaacaaacaaaacaaaagatacttctagtagagtgccagtgtctttagggattcatggggaattaattaaattcatggttggtactgatcatgttattaaaggaaattaaaatctagagagctcatggttaaattgtttaaagctcccttcagataatgcaaatttcaccatcaatgccctaccctgggctcacccagaaggcatttcttagactaccactatttagcctactgtttacaaagtactttcatacatgatctcattgttcagcacgaaaaaagctgtacacaagttggtgcaatccaagtaaggtctccagtgtagctaatagtagggtaaggaaaacgatatgttgacatgctaagtgagcttcattttgacttctttcgtgtaacatgtttgagtctttgtgctgagaaaattgtattacattctgggagtcagtgggttgtgtcagaatgtgtgggaagcagctcactttcactttcaaaagattctttaaggaatttatgctttttgtaaaataggggagactatttggactctttcttattgggatttctttttgtgtgttttatgagaccaaagggcactgacttccatcatacggtttgactttggaggacagtacgggaaagtgcagcagccttgtagttatagtggccacagaatgtagtcacagaataatgtagcaccaggtttcttactgtcaacaatctgtttaatttgattttggttattttccacctcttcagcaaattcatgtcactgggaaccctaagataaggaatttgccttccctgatcttcctgtggggtagaagtaaaatgataagaattcaatcgttaggttgtccatggacctgcttaagagtgcaaggaggttttaaaggtccttagaaagtcaaatgtggaccctgctgaagaagggatgcagcgttgcttacttaaaactgtagtgaacagagaagagagaaatttaactttgatattgtaggcctcaacgagtaaagaaggctttcaatcctggcaggtactaaggttttagtatcattctctttaataagtcatctgtggacaaaaatgaaaaaatcagaaagccataattactaagaaaggagatctgactaaataacaaagaaacagattttagaagtcctgaaaggacacatttgtttcagaattagctctgctaaaatttttctttttcacagaaggaataagctttaaatggctatgtgaaaaatagattatagggaactaatgttcttagatcatgaatcagggactttgttcatttatatgcactgcttaaaagttttcacatagttatcattgtttaaaactaattataatcaattgctaactcatcttacctgggaatttatttagtttagaacatgtaagtaaatttctttaaataaaaaagagaattttagtggcatgaattaaatgtaattcaacttgagcaaagaagaaatggttataaagacaaatattaacatatcaaaatcatgttaatgtgctaactttacctaagcaataaacacatcagaacagaaaaaaacttgacaataagaaaataagtaaatatatttttaatttttagtaactagatgtttctcagtttttctgtttaacattttggaagtgaatatggctggtatgtataatgcataagaaaaaaatcctgttttatgacaatggaaaaaatcatatttataagcttatgtcatgtgaactttgctacacatcaattaggtaaaactgtactggatccattttaaccctgtgagttgattgctttcagtgaagcttgctggacatctttatgtccgagagtgagatgttcttataattaggggcagctgtggtgacagaatcaattaggcaggcctgctgaacacttaccttccagctgctggccgcggcgcagtgatttgctccagcattcattgtcacggtgtattgcctttacacctcgaaagaacaacattaatccattaagccacttttgttgctgtatcctcacgtgggggttatcacatcgcagtgaacacaggagtgagatacagcactgttcacccttgtggcatttggcatatgacagatagacagctgcatagttcaaaagaattattttaacaccaatcgcaagtattgccttgttttatttccccatcaattatccaagtagctcagaaaattcagcaattttgcatatctactgtatttctcagactgtcttttgcacgtggaataagtgcagaaataatgtcatgtggtgtatcccaggttttgtgaggaaaatatggaccctattgatagatcattaaataaaatctttagcacattgtctggtagttaagagccagggctctggagtcaaacttcctgggttcagatactgacttgatagtataccagccgtgtgactatagacaggttactttacctctctgtttctgtttcttcatctgtaagttggtgataatggcagtaatacatatctcctggagttatcataaaacttaaaaacgttaatgagcataaagctcttagaacaatgcctggcacatagtaggtactcaagtatcagctattattattcaaaggtgtttattgttgaaagtactatatatatatatatatatatatataatgtgtatatgtatacattacattctactatatatactatatataaatatactgtaaataaaaaggactttatttaacttcatctcataggctttggaaatacattatagttgttttaagatttttatctttagtccctaactgtgaagtacagggcaaggaactgtatagaaaagagagattgctaatttcaataaataactaatttcaattatcagggtgaaaaattatctcacctaataaacctgcattcattttcccttgtagaattttacagtattgtaaatttctcacagacaaatgtggagaggtgatttggtttacatagctcattataagaacaaaaaatttactgtagtggctatgaaatggagtgatctttcccagatttttaatctactgtccttctctccattttctgcctccacttcaaactttgtagaaaaactaggtatggtaaaaagtcctaggtttaagttttggttctgcaacttgttagacttacgacattaagttcccctatcagtttccatctcctcacctgtaaatggaaacaatcattaggtaccttacatgaaatacacaccagaactgttgcagatgaaaggagatttgaccaaatagtaattttgcggatatgtagtgacaacaaggcacattaacagttaagggagcaaaccagcatcttgtagaccatggtcaatcaatggagaagagcaactttgacttgagggcataggaggtatggtggctgacacttataatcccagcactttgggaggctagagcaagaggattccttgaagaggattgcttgaagtgtttgagaccagcctgggcaacatgaatctctgtatacaacaaaacaaaaagcccagcgtggtggtgtgtgcctgtgcctgtggtcccagctatgtgagaggctaaggcaggaggatcacttgagcttaagattctgaggctgcagtaagctgtgatcacataacaccactgcattctagcctgggtgacagagtgagactctgccgccaaaaaaaaaaaattaaagcagagaaggtaatgtgcttttcttgcaataatacaagaaccgtctgaccactctgggtagactctgaaattaggtgaaataaatgagctagcaaggaacatgaccagggtctcggctgaggcagggtccagtttgagagtcctccaacagtgatggccagataagagaaatacagaacatgaaaacttcaaagtaaagataatacgacttacttgacaattttccagttagatttacatgtcatttttgttagtgtctgatggcagagcggcataagagtcctagcccagtggcatgcagaacacaaacaatgtcacagggcctcacgattccaaataataaaaagtcatagagaagatagatggggcctctggaatcattttgtacctgggtttcttctttgtcagcatcttccagattcttcctcatcctttcagcagacacttgaagtcctactttgggttaggagagcctgagatcctgtatatcttccattcaataaattcagaaattttgatgtttaggtatagtatcaatccaaatggacacatacacagtcaggaaatagcctaaccctccaaatagagactgtgaccccctgctattaacttgctgacccttgtttgatttcgtagggataaattccttgaatggccctctgtttgtacatgtgggtttttttgttttgttttgttttgttttgttttgttttttgagacggactcttgccctgtcacccaggctggagtgcagtggtgtgcccactgcaatctctgcctccccagttcaaatgattctcgtgcctcggcctccctagtaactgggattacagatgtgtgccacaatgcttggctaatttttgtatttttagtagagatggcgtttcaccatgttggtcaggctggccttgaactcttgatctcaagtgatccatctgcctcggcctcccaaagagctgggattgcaggtatgagccaccagcgcccagccctctacatgttttttaagtgcagtcagttgagtatggttttcagatggagaatctgattaatcatcttcaatggccttagcataagcattctatttaactgagctgattgtggctcataccctcaaatcaaatatcttaaagaatcatactgtttcagtcatcgtgtagcagttaattgtgagaagtgaaacttggaggacatccgtatgtaaaatcccccaccaaaggaaaccaatatgtttgggaaatcaaaatgaagcactagtaagaagccaactctggctgtagtggcaccactgtgatgagtgttagcataaaatgctgaaatactgcccccaattttattcttttatgttgtataatgaaacgttctatgcatgttatgtgcttgcaaagaaattattcagtagttcatatacacatcgttggattacataaggagctggacatggaactgctagaatggaatttccagagtccagccatcttaaccctactttgaagcctattcccagtgtgtttgctggttggatttagtttgctgccagtggtaaagagagtcagcttgagaatatattataacaaaatactgaattttatggcaacttttatttcaaatgaaggtgccatcctccttcctcagtagtcagggacaaatagcagctccattccagctcacagggaaccctatttaacttgaatcaagaacattctgtctaagcctgattcagctagagcacagggcggggtgagcacaacatcaccacaggtggcaacaaataatgatcttgttgggcgattcgggatataacccaacatcacccactgcgtcagtagcagggcattaaaacctagctgcattccgaaataccattaccactagaatgtgctgccttttacacagctatatttacacatttgataagacaaactttcccttttatagccaaatttgtgagtgcagctcagaagagaagaccagatggaagagcacaaagtttatccactctgttgcaggactgtaatcaacttcgtgagatagtacaaggagagagaaatatgactgggggagttttggagactctccatagtaatttatctacttctaacatgactattaacaaaaggacatcctgcatagaggactgattaatggtattcgtgtggctttcattagctaacataattgtcagtcaccggttgtcactgtgggatctgcacatatgtgatggtgggctttttacacatttatgcagggaagacttagctgggatcatagctgaaagctcattgttacttgataacattttgcaggtttcctgtgtaatttgttcaatgtgttgaggctcttcagattagctgcacaaacgtggagagtaaagatatgagctagctttgcattgtcagatccttcagagaccagaaataacaacttacctagtgtcacatgccatcagcatatctctgcagcagacacatgctaaaatttgtttcctgttcttaacaatacagtacaatattcgatatagctgcacgaataatatttgaaaaataagggcacagtagatgatcaaaacaagaggattgcttagatgaatgaggttgtttttttggaaatttattttgcccttaccacaagtattttttcacccattaaattattagaataaatgaacatgttgcattgagtttttgtggtggtcagaatatgaaatataagtatttttggattacaaccacatttttcttccctaaattgtgtgacatagcaaataggaaaagcagaacacaaaagtagactttggaagtatactttgcatacctgcatgttttgagttagagtcagaggagtatatttgtgatcttttaagatatttgaaaacacttaaagcctgtaaagagaagtattcaaaagaagctcctgtgaaatgtgtggcattgctctgaaagcatttgcatgtctgttttaaaaggctgttctttgcactggactgtctgcctctgttgatgcatttctaaggatgtggatatgtttatattaatgtcaagcaagtttgaaatagatttaggcacagactgcttaaaacttgctctgttattaaattgtttcagggtgtggaactaccgcctctctagaaacacatagagagcaaaattatgaactgcggtagaccaaatacaattaaatcatgcttaagattctcggaacacctcctgcatttgaagcattaacttagccttgagcttgccttcaactaatttttaattaacagaccttttatgcttagataagactttcaagacaagtaaaaatttttttgcacttttaaaattcgagtacttacttaacaagaattgaccctaagtttaggaactaccattggccttataaagttattcctgggtattagaagatacttggtgaataggttttatttcagtgaaataaatgatattgtttcatgtgagtaaaccatatgcctgagaaacacgtgtacattgaaaatgaattctattaacagatagctatttatataatctctgacaaaaagaaaatttactctgttgaaaattgactcattatggatagatgaaaaaaagtcatacaaaccacatgggctcaaatattagtttgcacttttataagaatctgtgaaatattcagggctattccagtagtcctggaagacaaaaagtttgaaaaaatatccataaagacaaaaaaaggtttaaaatttttgccctgtgtccttgatacttgaatttgagctctgccctgagtgagcgagaacctttgtatggtccttgtctagaaggtaccactgacggcagaacatccataagtcaaggatgcaattgtgcagctctgttggtagtacacagatgtgtttcttcacttacgctatggaggattttgagttatcaacttaagagagctgttttctgaaaagctggatatcctcatgtcatagaagttaccccagaaggacgcagcagggacattattacacctggacttctagggatgcaaagttagagtagctgtgagcttttccacatctgatgattttggaactatgtgcaagagagagaaattcaggctggtcactagaggtatccttgaaccgcaaacatcgagaaatgttcatacatcagggtcagcttaagaggggatattttagctaagaaggaccttggatctgaaggtctctgcctcattgcattgtagatcatctcgtaaggcaaggaatgtaccactctgcatatggaccccaaaaggaaaggagaagtgttgacctgcccaatgagtgattggtttccttccatcaaaagaccatagtggggttggggccctgaagtcacgattgtgaggatgaaccatgagcatttcagtgcaataccgcttgcagaatttaaatgatttaaatgaatgtaatgttattattaattaaatttaacttataaattattaactcaaatatttacaagaatttctttcatgaatgcaaattaaccaagagtttaaaaatacttaatgacatgaacataaagaagaaacctccttgagagcggagggtgagaagaacgtgacgattgaaaaactgccagttgggtactatgcttattacttggacgatgaaatcatctgtgcagcaaacccctgcaacactcaatttacccatataaaaatctgcacatgtaccccctgcacctaatataaaagttaaaaagaaaaaaaagaaaaaagaacagactaatgcacacacgcacacacagacacacatacacacgtgcgtatttaatgaagcctaggtcttttatctaatggcagaaagatcagatgagaaaggcagaaaatcagagacagaccaaggctcccggtttttttttttttcctctgtatgtgttagcatgtatatgtgtaaatgtatttctgtttgctaaaccatctaaagtttagttgaagacatcatgacatttcacccctaaatgcttaagcagatattgtctaagaacaaggagattcctttgcgtaaccacaacgcagtgctcctgcttgagaaatttaactttgatacaatatttttattcagatttccccagtagtcccaataatatcctatacagctctttttcccttggagcaggatccaatcagtagctccacattagattgacttgccatgtctctttaatctcctttaatctagatcacatttacagtcttcttttgttattgatgacattgattttaaagcctacttcagttgttttatagaatatctctcattttgaatttgtcgtattgtttcctcatgtttgaaatcaaaacccctaatacagaaataaataaactaatgaagacagaaggtgaagaggaaggagagacgagctagagagagaaaagaaggaaagagaggggcaaactgattttatgataaaatgtttatcaaaggggaagaaaacaaagtctccatagatttatgctcagactatattgataagcaaatatatggagtggtaaggggggaaacatggtccttaaagagaaggtatctgaagtatagttgacactcagacaatgtaggcattaggggtgccaatcccctgtgtggccaaaaatttaagtataacttttgactccccccaaacctaactactaatagcagcctactgttgactggaagtcttatcgatcacacaaacagttgattaataaatatttttaacttatatgtattatatatggtattcttataatacagtaacataaagaaaatattacaaggaagagaaaatatatttattcatcaggtgaaagtggatcattataaaggtcttcatccttgtcatcttcatgttgagtaggctgaggaggaagaggaagaggcgggcattggtcttgctgtctcaggggcagcagagacagaagaaaattcatgtataaggcattttgcttagaggcaagggaataaaccttggaagttctggtgtgttcccaagttaaatgtaaaatccagaggggtgaagaattcaaactagttatttcagtttataataaattaatgaggcaatgtatttttttaatatgtgtaaaccagtttttggtgtcatgtagcaccggcagatttgtttctttaaaacccttcaccaggccattggctcacacctgtaatcccaacattctgggaggccaaggcaggcagattgtttgagcccaggatgtggagaccagcttgtctaacatggcgaaactctgtctctatgaaaaatacaacagttagccaggggtggtatcatgcacttctggttccagttactcaggaggctgaggtgggaggatcacttgagcccaataggtggaggttggagtgagccatgatcatgccactgcactccagcctgtgcaaccgagcaagatcctgtctaaataaataaataaataaatcccttcaccaggctcacaaaattaaaaatgatcttaaggagttaacagaaatatgtagacactatttcagataacatgagaatttagtctgttttaaaaaacctgcaaaacagagattcatgaaccacattttaaaaagacttctatgaaagctcttcagaaaaaaatattttcaaggtgtcaaaaaaaaaaaaaaaaaaaagaaccagacaaaatattcaggtatcaagggctaagaacagctaaaacatgttttctaatttgccagtggccagtgtgtcaactacattaaatggctgcttctccacctcatctcccagccaccaaataaataataaggggaatatgtagctgtaggggtactgctaagaaatcacagcattcaaatgatttttttctgaaatttattggaaacttcgtatgttcattcttgacatttttaggatttacttggcaagggcagaatcgtagaaaaacaaatagagttccctgagtaggaaaggtctccatttcctgttcatggttaggtgatcctgattactgtccttggagtcttgagccccttacccggtgaataattaggtacggaatcagggaggtatagactcatttgcctgggtttgttttctgggagtttctgtttaacattcctgaactggagcagaagtagattttgtagctggcttttctgagactcaggaaacagaattgtggaattctcaggttctgtgacatttgttgattattaaagtgaaattatgtgtgagaggaaaatttattcatctatgcttttaagaaatgtctatgataaacagaattagacatactatatagaattgcataacacaccaccacatgtccgtattacccagtttccacagttatcagcttcttggtaattgtttttcacctttatgcctatccatttcccaccaccatattattttgaagcaaatctcggatattgtaacattttatctgcaagtatttcggtacatatttttaagcagtcttgcttaaaataagaatggtatgtaggtgtttaatgtattctccaagctaatgcataatttaagtactcacagtctctgttgagactatttagatgcactaaatccaatcaaagagagaatttgttgtgagtagtggtcatctggaatggtccattcattgtgtatgggatagaaactctgtaggtccagtcaaagagtgatagcatcagagaatttctgtcttgaagaaaggagccattgttaagattgatgggttttctgtgttctttggtcccctctgatgacaggatagtgaaatgagccctagctccgagtacccacaaactttgtaaccatggataaagtcagccacttacttatctctgaaattaaacttcccgattttaaaaatggatgtgatgcttcctgcgcctattcacagtactgtgatacactgtgatttgggatgtgaacacgctttaaaaataatggcccggttacatattctcctttttattttttatttttttttaatttctttttgaaacagaatctcactctgtcacccaggctgaagtgcagtggtgggatcatggctcactgcagcattgacctcctgggctcaggtggtccttccccctcagcctcccaggtagccgggactacaggcacatgccaccatgccgagctaatttttgtattttcatagagatggagtttcaccatgttgcccaaactggactccaacttctgaggtcaagtgatcctcctgcctcagcctccgtaagttgggggattacaggcgtgaaccaccgtgcccagcctacatacgctcctttaacacaggcttttggttctttgaaattaccaacattcaggattcttaatggcatcagagaatataaagcttgaaactatctagaatttttttaaggaataattttctaatcttggttctctgcttctgagtatattttatttgggcattttatttttctccaagatgagatccattttcgctcatccattttgaaattgtttttctctctgttaataaaacctttggaatggtgccttgatcaggctaactccagattaaatgtttctctttgaaagattgcctggtgatcagagttgtttttcattctcttttcttcttttagccttgcctccccgattgaaagagatgaaaagccaggaatcggctgcaggttccaaactagtccttcggtgtgaaaccagttctgaatactcctctctcagattcaagtggttcaagaatgggaatgaattgaatcgaaaaaacaaaccacaaaatatcaagatacaaaaaaagccagggtaagtataatgcataaaatagtagagactgcccccagcaataagataacatataaatgttatttagaccctaataagtgaatttactatcagaaacataatagataataagtgaaaagctgtttcattatataatgacaaaaaatcatgttatcacataggcaagaattcttgtggttcttacatcttattgatgaaggaaataaaggatggctggagaaagaactgtaggaagtaagaagagatggaagggaagaaggaagagagcattagtggtagatgctgtcatagtaatagatcctaaaattcaatttcttggccgggatggtggctcacaactgtaatcccagctctttgggaggccgaggagggcagatcacctgaagtcaggagttcgagaccagcctggccaacatggtgaaaccctgtctctactaaaaacacaaaaagtagctgggagtggtgggcgcctgtaatcccagctacttggaggctgagtcaggagaatcacttgaacccgggaggtggaggttgcagtaagccaagagcacgccaccgcactccagcctgggcaacagagcgagactccatctcaaaaaaaaaaaaaatgcaatttctttaaaataagacaaatgcatatgataatttagagtaccagtgccttacacagttaaaatcacaacttcattgtaaagctcagtgaatacttagatttatggaaagaattggaatgtaaccagttgaattcagactattttttaacaaggggttaatgatataattttatctaataagaatttttaactgacactgctgataaagcacatcatcattctagcagattttaaaattaggtaatcttaggtagcaagaattttacatgttcctaccctccccgaggaggtccatatttgacagggcttcatgtgattcctgtaacatcttggtggatgcattctgtatctactctaaaatgatactctgttatcatccctacactcttcattcttatttacttccttacttaagaatcatttcttctaatatcaaactacattttgaaatcagagaagagataagtggattagatttttgcttctaaagagtcctttaatcaacgtgacatgtataatagtggttccaaactcaaagatgatattttctgcactcacatctcacagggttccagtgaacccccaagtatggtaacagaagcaacagaacaatctcctatactttgattttataggacattaaccagaaagttgttacacattcatgagcaaagtgattacaatgagaattaaatttaatcttatcaaagattttgctctgatgactgtattttcttttctagtttctgtggttttattagctacatactttattaactacacgttgactctagttattgatcatgtcagatagatctatagctttggaagtataataaagtgtaaaagaaagggttgtatcactttctgcagcaggtggtacttcaaagatacaaaatataatactgtaaagagacatggcatttttatacctaatattactaattttttttacattattccaatatgtagcagttcagcagcacatggcaactatcttattttgcagattaggaaattgagggtcaaaaaagtgttctgctttgcctcaagtcatataactagtaagagactcagtgagagctgagtttatcattgttatacccattaaaaatgtaatatactgagaatgaaattaagtttcttcctgtagatcatagtggtaattaatggttcaagttagatttgaaataggtctgactctaagtctcatgtttaacagcatatgtgcatgaggggaggaggaaatacaatgaatgaattgaaaagataagtatgattcttacaaagaagtttaacaggacaaaaaaatactcctagattttggatggaatggattttggtgtttgcttttcatcagacaagttagtaaggaatgaagttatctctacatgcagggtaatgtctcatttatttctacgtggctgtcaaaggataccagtaatatttaagtgcccatgaaaggttttatgctaggactgtggagaaattaaagaggtatagggcattacaatctctgtgcccaggggcgggggtcataagattgtacagagattatctagttcagtcttatatgaaacatgggaaattttggaagttatgtattgaaacactgttagagcaggggaggaggaagggagggaggagaatttcatctagaagaaagcatctcacattgcagatattcaatctgatgctacctggagagaagcaaatgaagttcggtagataagatgagaaaatgaatttttttaaaaaagtgaactgactagaatgaataggctttagaaaaggtacatgtatacttaaagaggtaatttgttacctggcttcaatgacatataaaagtatcattagtattcagaaaagcattttcatattggcttcataggtccagacagctaagagcactgtctacatattaataaaatcccattataccagaaagggcaatagttagaaattacttcttttaaacaatagtcttgctggaaagaattaaatggggaaaaatgtattgaagtgatgcaaccataaatcactcgcagcaaagcagttaacatatttgatctaaaaataagacatactttgtatagagtggacagctacttgagaagcgatcatcttatcagtttttagaattgggtattttgtcatttctaaaattgtgtctttttataaagaagagcattgtcagcttttttaagattaaaggttccaactgaatctcaatttaattaacatttgcaaggtgttctattatttcaatttatccagtaaatataagtagaaggaatataattattgttatacccatttaaaacattaatatcctgaaaatgaaggaagctgagtttcttcctgtagatcatagtggtaatgaattgttaaacttagatttgaaataggtctgactctaagtcttgtgttttttcaacagacatttgtgattatgctacataaagttagaagtcagaacatagggctctggcatgcttaggataatgtctttaattaaaagattcttatttttcagatgcatttatatattactattaatgatttttaattactaagatattcagactattagtgttttgcagttgttagttggttacttgacttaaactttttcttaggctatgatcaaccaagcagaggtgaagtttagtttgaggtgtaagatttttctgggattctctttaattaaatactttgactctttcccaatccttagtcttggcttctttttcacacttcttataatcagattatgcatagcagccaacatatccttttaatctcttggtgtttagtggcacaatttcacagcaatatgcaatttctattattttgtaaaatcttacccttgttttgcccacggtcctactaaaaactacattcctacgtgttctttgtatgatttttgaattcccattgagcctttgtttatttggctaacccatgtgtggggccaatgaaaagaaatggaaactaccctcatgttatatgtctgcttatgtctttgttcttgttttctttgattggtggatgattttgatcaagaaaactggttaaaaagcttggcgtgtgacagattcatatgtaaggactggcagattgacctcatttaaatacctgttctatcttagctttattaaagactggcttcctattatttgtatgtttcacacacttttggacaccattaattttgcctcagctcttacatattttaattttgtttaaaattggctgtcattggttacattggacaaatattacaattatttcctctatttttactggttgctttttttgactttataatggaaaaagtttatgtgcatttcttttctcatattagctgagcaactctggcagatcacttgaactttatatataatgaaatctcaatgttcttatgtagaaaatgagaatcctcagtggcattccatatggtttatgtgaggcacttggtacagtgactggttctgttgcttaagaagcctctcttttagccaagcacagtggtgtgtacctgcagtccctgctactgaggatctcttgagcgcaggagttcaagaccagcctgggaaacatagcaagaccccgtctctatacttaaaaaaaaatcataatttcctctttcacttctttgtccttttcacgatgatcagttttacactatctgaagcagtgttggacacacacacacacacacacacacacacaaacactgtctatataattccttaggggtcagggaaccaaaactgtataaacagaagagttcttccctatatgtgtttaagttgccttagcctgtaactatggtagaataatcgagttaaaataaaactaaactaaataatagctaatggaaccttgaattcaccttgtaagtgagcacacagtaaaaaacacagtgtgctttctgatattaaaaaaatgaaaaggaaattaatattcagaactttttatcttcaaatcacttcacattaatttatttttacactgtactgttttttcttattctaaaagtaatgcatgcttattatgaaaatccaaatatttcaggaatatagaatgtaattactataataatagctaacacttattgggaagttactatattgaaaaaattattttaaacactttacacgaattaactcatttaatatttttagaaaataaaaatccattgaaacaccaaccttcctccagatccctagaaaactcatcaattaaagagcaaaaagttaaatttatgactataagggaatcaagtagtctttccaagctaatttccttcttatagacagagtatggtatcttacagaaaagaaaaaaagaagactgttgtatccatacttatcaaagccccaaatctttttgcaatatataattttcaaggaagatttggctcattctacactcttactacattctgtccttactctaggacacaaggctggatgaatcccatagttaaatgtatcattagaattcagagggatgtttatgctccttgaggtcagtggttttccaatgatgtctctgtagagtcctaaatttctattgaattgcaaaaaggattaccagtcactctgacctggaacactttctgtgtgatatttttgaatatgaggttctgatttaagctttcattttaaaacaggattttgttgtaaaaaatagttgaaaccactgatctaatttaatctttctctgcacagagatattcttgtaggaatgtgcttggcaggtggctatccagacttgaatctttccaaagagaaaacctaactctttcacaagacaccctatacatttttgaatgctcagaaaagtgcttctatgtaatatcattcaaaacatgtttcctttttcctgtaagacttagttttcctgtaagacttagcaatcccaaataatttccttttccatatgcatcctggaaatatatttaaatagctactcatatttcattcatagttgtctgccagtgggacctctgtttctttaacataatcctctctagtgataagatttctaggccctattcaattctgatcaccctcttctaaagtcctttaattatgtttttttatcatcaaatatcattccaaagtatatccaaagtataattcagcattctagatatgatctagccgatgaggaatgtattggggcttttatccaagttgattgatgctctgctttaatattaatttggctaaagagtacataaggttttttttgttattctttcttcttaaaaatagttttaaaaatgggttaataataagcatgtggctaattagaaatccttatttctgcatatattgtagtcaagggatatctcctcttgtatttatgtcaccagttttcgtacgtgaatgtacttgtgatgcttatctcgatcaaattgaatcttagtcttggcccattgatgttctgtcttaggattcccaagggtgttctccatagaaaagattccatggccacatgtcatggctgccttagaaattcacagtacagatttgcaaaaattcactgagatgcattgttgtaaagagacctatttaactttttttaatgcaacatttattttagcatagaaccattttttttaaatctctctttcttttaaagcctaacatttgattgcattactaggaatagtattccaggaaacagtgccaaggcctattaggagaagtttgattttaagacttatccctttaagattatgttaactgtaaatatgattaccatgttttcttatagttccatctagttcaatagttaaaatgttaattgcattgggtcaagaaaggggtctttacatacaaacacgattgttcctagatttgtataaataggaaagaaaggttgttcttgagggtgttgtaataatcttggagttgtaaattcttgggatgttgttgtaatcttatctcagaatttggggacttaagaaaagctacagttttcttactttagaaatttactccttctgtggcattgaaaatcaagatactatgccccaccctgatattgttcataatttatctattattgctagtggtttcatggttatacatgaaaattcttccagcaaaccatgctaaatgttgggctggaaaatcttacagtgcttatccatttttttcctcactatttttcaaaggtacctgtcatgaaggaaacttgtcatatatgatcaaagtagatatatagctgataatccatttaaaaaatcatacggtatttgaacgctccaaaattcagccccaaaattaatacagcctgcattgggtgatattctaatattgttttatttcgataattttaaaagttgtcatattttattgttaagacatatctatttgcaaagatacttgtcatcaaaaggcccattttggcttatagggatatacttcagggaagctttcctatgaataatgtctctggttgatgtgtgaatattctttaaatggcccttggtggtctccccattcctagatagataaggctgttaaattacatccactttttgtcaactttgttccgtggaccattattttcagaaaacattaacagatatgccttgtgaatgaaaaggattccatggtcaaaggagtttgagagaaaataaataatatatcccttttcggggagtcagagtacaacagcatattcaagatgctgagaaatcctgtgagattaaagataatgaaaagcctgtctttatttcacctaatattttccaaatttatttgaatgtggaacacattgctttgttacctcatgtttacctgttgacatcgagtcccgactagcgcagttaacttttctttttctttttctttgaccaagtctcactctgtcacccaggctggagtgcaatggtgtggtctcggctcactgcaacctctgcctcccggattcaaatgattctcccgccttagtctcctgagcagctgagactacaggctcatgccacacacctggctaatttttgtatttttagtagcgacagggtttcactattttggccaggcttgtcttgaactcctgacctcgtgatctgtcttcctcggcctcccaaagtgctgggattacaggcgtgagccactgctcccagccgtgaagttaacttttcaacccctatgttggtttgaccaccactgcccctggtctggaccacctctgatggtctttgccctctcattatggcatttttctttcctcccaaccagccttagaaatattaggttctgctgagtacttaagcaaacatccagatattttattcattcattcacacatttattcaataatgtctgaagagaaagcatagcctgatgtatgctccacgagactagcaagaagttgacattatagctacactctccaaagtatatgtcctaggtcaagagatgagacatactgaaggaactctcatgagaggcgtactcagggctgtcagaatttagacacgtgagagcagctccagctacatgaccaggaggggcttggtgaagcagttggcacctgacatggccctggaaggtcagctgagattttgatgcataggaatgcaggacccccattgtaggaagaaaaaatgacacagacaaaagcacagaggtggaagatcagggggtctacatgtggaactttgggtggttcaatcggatagactggaggatactagtaggaattatatttggaacaattgatttttctcagttaacattaatgtgtgacaagaagaccagaaaattcaccagaaaactagcaaagtataacgtgggagatttgcaaccagaaggattactgttgtttcttcctcctttgttttctcccttgtcgttatccccttaagagcccaataaatcacagttaccaggctagagcatagaaggattgctattattttttggagataggggtctcaccctgctgcccagactggagtgcagtgactcttcaccagcatgatcatggcacactacagccttgaattcttgggcccaagtgattctctcatgtcagcctcccaagtagctgggattccaggggcatgccaccacaccaggctttagaataattctttagaaagaattcagtaaactctgagccaatccctgctgttctgagttcttatatcttggagactgcttaaattataggttatgtgcaacagtaaaacacagacacagcaaatcacaatgctgcccatgttaaaaaaaaaaagtgaatgttgatgtaatattcagagttttataaaactatgtgataatgttgcccaaatatttattccagtattaagaacctttcatgtggtactatgctcccagcaatgagaatcttaaggaaagaaaaattcccttccttttggaattgataaatcctcttaattcaaaattaacattattcttgatgttactctactgagaagaagagtgcacagtatttttaaaatctattctaaccttcagtaagtgtccttaacagacttgtaggaaatgattttatacatttttctcttcctaaaccctagtggctgatggcatttggatatagaaaagtaagaaaatttaccaattgggtttaaaaatctaaagtataacacagttattggtgatggtaagggagtaaaaagaaaaactacagaagaattcctttaaactactgatttaggtgataaaattgagatgaaatccatggtacaacttaaatgtgatgcatcttacttttactctaggtaaaatcatgaggtcagatcaatgtaacggaagttgtattttaacatatgtataaggtggggagaggcagtttgagaactctgaaagcatagaaaagtatgtatttatatttgttggatttctgtgatatatactgacaccactttggtcctgatcttataggaagtcagaacttcgcattaacaaagcatcactggctgattctggagagtatatgtgcaaagtgatcagcaaattaggaaatgacagtgcctctgccaatatcaccatcgtggaatcaaacggtaagagatacctacggtattctgttcctcaatctgtaacaagagtaatcaaaacatgtggtaagactcataatagactggtgtgttaaatctcattgtgaacaaattaaaaacagagaaagaaaaccagatgtttcaaggatcttgtatgtctttcataaatttctgtactctatgagattatatagacctgaaatatacatatattttttacaaaaggattttaataaggccatgaatggcagagataggttgggttgctaaaatataggggctatactatttttttaagttggtcagtgagggcagtcaagtctttggctctctgaacaacagaatacagtcatatatatatacaggatatatatacacaatatgtatatatgcacacagaatatatgcatattatgtattatatatgcgttatatatgtatatatgtttacgtatatataacatatgtattatatatgtattatgtatgtattatatatgtattatatatattacatatataatatgcatacatatataatatgcatatattctgtgtgtgtgcagaatacagtcctgactcaattctggcaattttattcccattacatctggcattaggtagtagaaagttaaaccattaattttttttaggcctattaattttgaaattaggaccgtcttagaggcaataaatttcctactaggaagaggcttcatcttcagctttgttcagaatagtaccaggcaatacttgttaaacaaatgaatgacttagaggtaagaaatacaatccacctctgacaacttctgtgttattccaggaaattaaaagaaccaccccgatggctttgtgttttgtaatagcctgatactccatgatttgatggaatcatctataggagctgatgatgatgatgacctagcaatgcttctttaaaccttttagaataatcaaatgctattttaaaacctttagtgcttatttatttatttattgaattatggcacttaactattgcctttacaaaatttgtcatctgttatataaccaagcctaattgcatcttcttggtaggagatgagaaagattctgcatttcaaaggcaagcgctcttaaagtgataaggtaaaaatgccaggtcagcacaggcagagttaaagtaattttaagggttaattctatgggaggctgatgtagtttttgtcacttgattcttctgtaacatactaagaaagtgagaagggagataaaaatcagaaacagggctgggaaaattcaggttaatgcctcatcctctctggacttctcaaggatctgctccatcacagagtaatcaaagtttatcactttcattttaaatgtctccctccatagagagtaaaggagagcagggaaaaggagtttccattaccattaggagtcctgtttattacagtttaaaatgtaaaagccatttaaaatttatatgagtaaatatagcatcactttattttttaaccagggcaggttaagcaataatagtttgctagtattactttaccccacgtagaattctataggatgctacctgaaacacacattaaaaaattaattttaatgggctgttttttactttctactataaccattgtttgaagctcgttctccttagtttgtcactggcttggttcagtgtgtttcctcatagttaatggtattcaattgtgatttttgacacttggatttgattcgtgtagctataccacaaagtcccaggaaaataaaattaaagctagtgtcatagtctcactgagtgtctacagaagtatcatattgattattccatggtttctgatttacaggattaagcaatgaattatttactactatattattcctggcaaaaacccatagaattccttttttattaatttgggggtactgaaagtttgataatatggctttttacatttcttacataggaaaaacagctaattcattttttccacattaattcactgaagtcttggtctagtgatcaaatttgaatatgtagtgttgaccaattatagggtagagagatgaaactcgaggtgtttttgataatgagtcttttttacctggcaagaataaagagaagttcatggaatattttaagtaaatccttcttaaacaaccaacaaaaattctttcagaaataggttcctatggacttatgtaattaaagcctctgaagaatgagaatgaagagtctcaattgcaatgcaagttggccttctttttattctcttcttggaatgttaggaatagatcatccttatccaaccccttcattgtattaaaaaagaataaaagacagcatagaaaacagacttattcaggatcacagagatatttaacagcaaaaggagatatgaacccaggttttttttgttttttttttttttgtttttttttttttttgcttcattcctaccacagtgcagttccatctgtatctgaaatgttttttgtgtgtgttttcttttttgttttttgagacagggtttcactctgtcacccaggctagggtgcagaggtgtgatcttggctcactgcaacctctgactcctggactgaagggatcctcccacctcagccccctgagtagccaggtgcatgccattacgcctggctaattaaaaaaaaaaaattttgtttgagatggagtgttgctatgttgcccactctggaactcctaggttcaactatgttgcccactgtggaactcctgagttcaagaagtctacccaccttgaactcccaaagtgctgggattacaggtgtgagccgctgcgcccagccttactctgtatctgactatatgcttgcaaatgtttaagtgagattcttttgcttataaagaacagaagctgaaggaatggtatgaggcctaaggagtgagggattctatggcgaagaactagaacttcattataactcagcctcgaggagatggaattgtatgctgagcatctctgcgaatttaagcaatgcgagtttgtggcttttctctctggtgtttctacctttaatatgcttctgatagttttaacaaaagttacctaccttctcacctctcctactttcagactccgcctctttataattccaaactttgacctgtttcttgcccccacgtggccatattcttcatggcaatttcaggcattctttcagctttaacctctactgtatgattgtttccttggttccccagtgaaattccgcagaccaagaatcctattagcaaagttgattgttgcatattcattaaaagacctagagaacttacaaattatctgctgtctggtcatacgtccactgctgcctcaactagggagggtggagccggaaacatagctgcccggaagctcctctcttcaaagtctgggggtggagcatgcagctcacctgggcctgtggcttggcaggcaccatgattgacaaggccagtttcctgtacattagaggagataccctttttgctctgcaccttagagtcctagttatagtgcatccagaaggaaaatatgtaatcatcttgatcccttatcctcttccactgctatctaagaatttgctatattctgttcaatgcttggttgtcaaagaagcctcagttgggttctgagctctccggggcttagatgcactgcctttgtattgtctcattcctgtctccctaggaatcagggcagacgttgcacagaaacactttttctgagagaaaaagggcactttctactgggtttataaattgccgcaccactgaaccatgtcttcctaaatagatatttaccgttgacttgggctgatagagagtagaattctcaagaatttccttccctccctccttccttccttccttccttccttccttccttccttccttccttccttccttccttccttccttcctttccctccctccctccctctgtctgtctctctctctctttccttttttttttttttttttaaatggtgtttcgctgtgtcacctaggctggagtgcagtggcaggatctcggccactgcactggattcaagcaattctcctcctggattcaagcaattctcctgcctcagcctcttgagtagctgggattctagacaccccccaccacaccccagctaatttttgtatttcttgtagacaaggtttcgccatgttggccatgctggtctctaactcctgacctcaaatgatctgcccactttgggctcccaaagtgcttggattacaggtgtgaaccatcacacccggtcaagaatttattgtttcattgtggattctagaaaaaaaaaaagttgttaaaataagaacatgctgtcaaactattacattatgtagaactccccttgagattttaatttatattttctatgaactatcagtcactttattaatttcattttttcaccttttctatgtatttccaagaagctcatggctatagtttcgagaatttctatacaggtttccttgatgaatgatccttgtaggttgctgcaatctaattatcctaattttttcctatgcagaggattccttgtgattcacttaaattctcacacagttactttttgtatgttccaacatgtttagaacatattttgatacaagattctaagagagatggggaggttgggggagacattcgttggaagctgtttactttctccccagatgaccttgctgtttggcatgatgtttaatctcattaaggaagctatagtaattattaaaataaaattagatcataaaagtcttctgcaatgaaactcattgtttagatctatctggattagtgactaaatataaacgaaatgattaaaaaattaggaaattccccttgaaacagtatatgcttgggtgtaacagtggccatacttatactgttttcaagcacttagaaaataatacagtcaagcattttgccaacctacattttagaaatgtaggtgttttctgtcttttccaatgcctttcaacccctactttattcagaattagagaaagtaatttatcctgtagtagacatatatcaacctatgcaatctgctaattacttctgggacaatgtaaagcttacaaagaccagttgggttttcatataacaaaggatctcataggcagtaattatgtgataacttatgagtgaattcctttcatgaattcgtatatgacagcagaaaaggccacatacatcatgtttacacaccctacacactatatgttcatttgtatttgtggtttatttggctcagtctgtatataggaaaccttgacttagcaattaattcttagctaacaagctttgtgaaaactcctgggctttagagtagggaagagaataatagactttactggtttccaaattaattaagtaatgctttcttttaaaagattaatataggaaaatatacaactaatcaatcatatcttctcctaagttttcttttttaatcagaagaaaaattatttgaatgagattcaagttcccacaggagcaattgggcttgtagcaaaaaaatagctgtttcatttgagatgagcagaaaaatattatttttataaaatttaattaaattatcaattgcagcttttaaaaatagactcatactggtaataggcttcgccttaccccctttcccaaattgataatgatgttagaaatttcacaatattgggaaacaacctgcagttatgttgaaaagcatgtaaaatatgttttataatttgtataacagtctacatgtatattgtattatgtaggatgcccaggaaggcaaatacatgagaacaatatgaaagcaatagggtagatttgtcttttcaatgtatggtatccatcctgtctacactgtttattaatttcaaaatttctcagttgccttagagtaagcattcattatgaacaggaagaattcaggtacttaaagatgttccttaagttatctttataactgctaataaataaatatgtccacttttaaatcttttaaagaaatcacttgatcaaaatttttgtatgtacagcagtgacatataagtttggtaaaaaagtcacataagtgaatgttggaatacacacagacacattttatgtatgtttgtatatactgtatacaatgtgcatatgtgtattttgctacataattatatttagtgtattatgatcatgatgaaattgcaaacatgttacattcataataattagaaaaattcctttctagaagatatctttgagaccatgcaactttttcctgagaccagaccccgtttattaagaaagaattcaaacattacaaatatactaatgttcattatgtttacttgcctgttcagcataagttgctcagctgtgttcagtttctgataattctaaaacctcattaatttgcactaatgaaggggctgtcctttataaattaacaaatgtaatatgccaaattactatgggaaaatatgttgcttaaataaacatcataaagattgcaggatttaatgcttttttaaaagtctgtaagtgtaatataaaattactttcaatttacttttaacaaaaggctgttttccaaatctataaattctacccatagcacacataaaaatgcttgctgagtggttttaattaaaaagattaactttcttactagcaagattctttttacaatgaagactcctttggtgtagaagtataggttaacttttgagcttgtatttcctccagggttaattcagaaagtttgtatttgaaaccataatcattaaagatattttaaggtctccaagataaatacctgattttaggaagaggagttattttaagttgtctctgtgtagatgcctctttgtagtaacctcctgttctggtatttttaggtaacattcaattaaaaaatgaaacattatggttaaccttccctctaatctgaggtattttttgctggagatagaaaagttctgatttttttttcttcttggaaggtcacagtggacagctactttgtttgtcaaaaataaatttgaaaagagtcttgatatccgaattgggattgggacttctgcccagctctagttgagcaccttgggtttacgacttcatctggttgtaatgtcattgatgaatcctgaaggacaagagaaggaagcatctctcttagtgtaggtcctttgtttggaaacatggcccttctagatatttctagagaaggacacacactttgtatctctaatatagtttctttgagattacattttctcaaagaagaacaatttcattttctgcagcccaaatcaagaaagcttgttggtgctgcttcagaaacagatatcttcatattaccaattcggaatatcctctttctcgcctgatgcttgagaaaatcctgagaaaatgatgtaccctcacatactaattcctttcagtgagccccatttttagtggatgtaagagccaacgtaggcaactttgatgtattgaaaccaagcttactccttgcatagtttgccctcctaatctgtgattagagaggatcatccacacttaatttgcagcagaaagacacatttggtcttactaaaggtttattgctaatcacttgttcttaaacattgctgctgagtctcacatgactttgtttccctttcaattccacaaaatcttttgtccctagagaagcttcagagtttgaagaaatattggcgcttaaattgattctgcttacctgctagactagtccaatcttggaaaccctaaatggccatatctgtatttaaagatgattatattagtaataaagttttctactccattattaacagaatattaatttaaacataaaattatatatgacctgcttaggattctcggttagatctcataatttttgtacagtagatagtatcgcagtagattcagcttatcttttgtcctggttagaaaatgtgaactaccattaagtcatttggcaagacttatgacacagtgaaacttgaatgatatacatcattgcatctctacatctttccaggcttcataaaactgtacctttccaaaagtgttagattctgccaaactgaagcccttttcagaactgaatatggaattagacagtgtaactacccattccatcataaaggcagtaagaaaacaagttgaaagtttgaataagactgtcacaatcctcatgaaaatgatgtatccagaagtatacaggttggattcatccttcatttctttgggtgggagctgcatacttactgcctgggtagctaatgtctatcatatgataagcacctgtcttcattctcactggcaattttaaatagaattcaatgccagaacttgatgtttttcaccaatcctaattagaaacatggcttacttttatttttgaacaaaaatgtacttgttcaaagatctgtaacttaaaaattcttactacagcttggcaatccgatagctttgactttcttagttcccctatttcgacttttcttcctgagaagcctactgcctctttgacataaattcttcctcactgacccaagtggaggcagtgaatgcttcctaattattttagcacagctgattttatgctctttgcataagaaaggagaactatcaatttggactgtctttctgcatttctcactctctgtatggttaaagcctggacttttctcactcccttgcaatacttccttcctttacacttaacttttagttccaaggcaggctgtggtacctgctcccggcctcctgtttatatatcataatgtcctatcacctttttttttcagagatcatcactggtatgccagcctcaactgaaggagcatatgtgtcttcaggtaaggaaaataagcctggcaaattttactaaccagaatgacaaccataactgctggctgctccttctactaatcagaaccccttctgcatccagacctctcagctgctcttgttttctgcttcaatatttttctcaaccttgttctgtctttttggattttacttaagggaggatggttcttgctgtgtcttcaaacttaggcctgagaaacatacatgagtgaaagaaatctatatctaggtgcaacttaatgacattaagcaagtaaaggagatatatctgagttacaagctcagtttttatgtctttccaggtgattctcttagctgccttctactctttcacccctcagagtgtattcctgggtaatttgtcaacatctgatccgtgacctttgggtttctaataatcagttgtggatcgctaaacttaacaaaacaaaacagaacagaacagaacaaaacaaaacaaaaagacttacagcctttaaaaatgctgttgtctttgttttggttggtttctcacttgcctgtagtatttgctgatagcacttatagtctgagcagatattagcaacttagaacccaactctagcaatgcatatataaccataattcattgatttcttcacaagctatgaatttaatctatcctctatgtatttcattttttaaactttttcttattctttgtaatgctataattaatagagccttagaacatttaaaaattaatctttatttggaagaaaatttttgaagacccaagattggaaattcatctcagaggtacaatggtaatttggttttgcatggtgccttttcttttacaaaaattcttaaatttcatttgataatcacaataaacttgtgaaacaagacatcatttttcctcattttacagatgagaaaactgaagtattagaaatgttaagtcatatacctcaggaagtagaagagaaggtatttcaagttcgatattctttttattactccacatttaatattttagcttcattgagtttttcattatggctggtaccttgttgaaactatagaatgacctataatcaacatgtctttttccatcttacctccatcatttcctcttcccttcaaagccattttttaaaaccataaaagctaaacatctctgtatcctagactactttagctatatttaggacatattcatatgtcattactaagatataagtgtatgtgtgttgcggaatggtatgatcctggagtctaagaggttgttactcttctgaggaaaggaaggaaggaaaaaagaggaaaagagagagaaaaaaagaaaaaaaatcacatattctaaatttcttcacctttcatttacacgtttctgtaatatagggacttcgttatctgactccagtaaatgccattaggaaaaaaagagcttttacatttatatggaacttatcttgggaaattgactataactattatttcttaatatgtgacttgaatcttgataactttctggctgttgactttcaatccttctttgatactaagacttctttatttcttactaatgaaaacccatccgttccatgcttttttcggcatgagtcatatttttcattctctctgtacttaatgactgttttttcttcttttatctttgctacctgagaaaatcttgctactagatatccccaactattgtatgatttatttaattagcatggtttgtttgatcctaatgtaattattctattgctctagcagactttgcatggacttttcagcactttctggtccggatgtttatgcagatccaagttgcctggaaatactctcaatcttgtttgtttatttatttggcatgcatgaaaattggctttcactctcttggaatccaggggctattctctttggtttcatgttttctcaaaatcaagaccacatctgaaagaaggaattttctttctcacctgtggtgtgtatctcctcagagtagtctctcttggaagttcagataatgcttggtgtgtgggatattcttacagatggattgactccattttcatcccttttaaaagtctttgggtctagactatggtaatattcctttgtggtctttgagtattgcattctgacttataaatgcttcagcttctctgttgcacggtgttctactactcttttactaggcgatacccaagcctggcaaatttctaatttatgagtccaagcagcatgactcaataaagcctcattccacttttatgttttatagagtctcccattagaatatcagtatccacagaaggagcaaatacttcttcatgtaagtatacttaaatattctattcactggtttttaacccaaggcactatctgctttggaaggtcatgttcacgtctatcttctgcccctattaagggtcagagtattgagtttggcaataggtggtatttgctgtttggagtagaaatggcctcctaatatgcttaaggacaactagacatcctgtcctcccaatatacataagaatattaaaatacaccacaaatgtatcagttttagggtaatctggtggctttgaatattgaaaaataattgcacaagttctgaggcctaattcctggcaagcagtagagcacattgtgtgtcttttcagcttctctggatgccttcagcaactgcctgaggcatgatacccagctgtttggagcttccgttccaaaacttcttcattctcatataaagttagctgtgatggagtaagaaaactatatatagatgcccttaattcaaatttgatagcaagtaactgattatgaaaatgtttgaaagcaagcccctaggcaagatctcagattagttttcgtctatttaatgtgaaatgggctttgtgcttgtggacttctataactgttagattgattggggttttgtgctatgtcgggggaacttaaaatattagcaaggactagtataaagagtttttgatacttataaattgagaatatcatcgtattaaattttgatactcaacaggggagtttatcaaaccttgaaaattaaacttataactacagtctttctcttccttatgttagctccttatttaaagcatttctcaatttgataagctcttcaataaatagatgttcctagttattctatttcgatctggggagtgtgttgaaggaacaatttccttttgctatcagcagggtaggaaaactcatgaaaagaaagtctgtccttttggcaatttaagttgttttgtcaatctgtttaaataaatcctgtttgatgttacagcctttccctccaggttggtgatactagaactgtaactatatggtataaaattatcttttattgtgtgaagtatggtgttttggctatattttaactacataaagcgtcatttaactggattgatggcaatagcctggtgagatcaaacaggaaatgaaatgctagaaagggccaaattagtttcctatgtgttccaagggctctcatcatatcctccaaaatgataatttctgccggggaatttgtgctatttgttttttaattctacttataaaaagattagtataattatatggattttatgtagctagcatccaggaatcacattgagctttttttttttaagtgtttattctgcagaagcaaatactaggtttttcttttttggcattttgtctggaaataatttctctcctgtgtgattcattgaataaagttattgaaactcttgtaattggaacccttcatgctatcatcaatgggaccatagatactatccttaagcatatctgagcagtttgagaatgtaaaaaaatacttttggttttcccaagctttggggaactgaaataaatctctcagtttatgtttctattcattgcattatcactgagagagaaataattatgaaatctgactccattccctaattctcagtagaattagtttttgatatttggcaatggtttaaaactaagaaaggaagctttgtgtaccatgatattaaaatatttcaatgtgccattttcacacatcagtcacccggggtcatggtaagttctcagtaaatatggttgaattgattcatgaacacatttttttgtggaacttaattttattaggagaatataaacaatgaatataataaactagtaacacgatatattagaaggtgctacgtagtccaaaaatgagaaacagtagaggaggggaggggataaggagagttgaaacttgtgatttttattaggttgatcaaggtaagtctcattaaattgttgatatttggacaaaaagtggaaagaagtgaagggttaactttgcaaacatctagggaaactggctgggcatggtcgctcatgcctataatcctagcattttgggaggccaaggcgggaagattgcttgagcccaagagtttgaggccagtctgggtaacattagtcagacctcagctctacagaaaattgaaaacttagctggacttggtggcatgcacttgtagtcccaccttcttgggaggctgaggtgggaggatcacttgaactcaggaggttgaggctgcagtgagctgtgattgtgccactgcactccagcctgggtgacagagggagactctgtttcaagaaaaacaatcaaacaaacaaacaaaaaaacatctggggaaactgtatttaggcaaagaacaggctgtacaaaggcccttagacaaaagcatggctcatgtgccgtgtaggggaccataaggagccctgtggggttggagtagaaggaacaaagggatgaaatatagaagatgagggccacagaccctggggtctgagcatgtagtgccttgtaggccattgtcaggacattggtatttaatggaatcactctggctcctgtgtgaagaatggctcactgggaggaagggtagaatccaggatcccagttaggtggcttttgctgagagcatagtggcctggcccaggctggtagcagtagaggtggcaaaaaagtcagtctgtaatagtttgaaagtcaagccagcaagattccctaaccaattcattgtgaggtgttagagaaagagaaaagccataggtaaaaccaaggctgcttttgtttttggtttttaacttttggtgttccatttgattttcttctttggctttttcattatacttcttcatattaactattgttttacttgtttttttataattacaatatgcatgttttactaatcctagtgtgttttttaaaattttagattcagcgggtacattggcaggtttattacattttttaatctcatgaaaatatgctcttcagtttgaaaatataaaccagtcgtggcaggaaccaggtccagtcttagttacaataatgaaaatagcatgaagcacacagtccatttcaaggcagccacacgcaggacttgcattgcagggaacgactgtgaggtacaaatatctccatttagtaaaggctgaaggtgaaccttgaagagtcagcaataacaataagccaaactcaaaaatgccaaatatataaaaaagtcaaaggcctcagaaaagtttgcctggtcaaaaataatcagcttcaaagaatagatttcttttcactttattttagccagcaaggagatgctagtaaatccctgtatttgaaaagcgaactctgcttttctaatgtgattgtgcctgtaccggctacattctttgaactaatgacattggtgttttctaaagtaaatgttgaaaagcctctctgaagtagtatggattcagcaaacattttatgtattaaacagttctctgcgatttgggggtcagtgtaagacaggggaggctttcagagcaaacagatataggcagaggagatggatctgacttcacagcccccaaagttcccttttttcctctttaactcatgttggattagaagaaaaaaaaaaaaaaaaaaagagcaggcatggtggctcatgcctgtaatcctagcactttgagaggccaaagagggaggatagcttgacaccaggagttcgagactagtctgggcaacacattgagacctcatctctataaaaaaataaagaaattagccaggcttggtggcagccctgaagtctcagctacttgggaggctgaggtgggaggatcacctgagcccgggagtttgaggctgtcctaagttatggttgaaccactgcactccagcctgggcaacagagcgagaacttgtctctcttaaaataaaaacaaacaaaaaaagaaagaaagaaaaagaaaaaaacaaaaagaagaaaatagaagtcactcacctacccttctacctacttaatatattataagcatttttctcatgtttttaaatagtaatcagaaatatattttataggtcactgtaacaataaagaaatcattcttgactggaggtttttaagggattttttcatttacaaacacattatcggttttgccccctttctgtttatttttcctaccacttgtaaatattagtgaaatatcaaagttcttagtccttccctttgtaagacaatttttactactcaatttttggaaattggaaacttccattgttcattcactagtttagagttgttaattatatttttaagttctttatactaatctaataaagatcaaaattataattttctttattttcttttgttttttgtaaatgaggcatctgtgactaaaaacttataaataattgcctaaatgagttttctattacatgtaagtgacaagttttaggagaagaacttgaaccttacaaaacagtcaataggactatcttgctgctccttttatagaatcagcagaagtaaagtgattgtttggaacaagccttaatgacttcttctggagatgccagctgctggtagccccattttgcagacaattctgttgaataccataaaaaattgttataccaaccactttgctgaattaagcaccatccattccaatttaatacataaatgaggaaaacaaaacggaaaatctaacaaatagtaataggaaagaaaatcaagataaatcccgggaaaacagttgaagtggtaatatctgtttcaaatatgaataacagcaagcatttattgaaggcttactgtgtgccaggtgttgtgctagatgttttacatggatgatgactcatggttatcatgaaaacttattacactgtacgttgaaactgatacatgttgtccaaagtcacacagcagcatttaaccccagataatgcagtggactgctatgtcacataacgttttgctgcctcaaagaaaaagcccttactattgaaagaaatgggattctgtgagtggattgaaaggtagcctttggcaccaagtttattgggagtatatgtggtggattcaagtaaatgacttgtctggggccagttgtacccaagtgatcttcatgttacacgtcaaagcatggcaggtgaatgaaatgggaagagcacaaatgctgagtggactcatgctcttaagtctaaatactaatgctgaggacaatcgcggtggctcatgcttgtaatcctagcactttgggaggccatagtgggaggattgcttgagcaaattgatcatttgagcccaggagattgaggtttcagtaagtcatgatctcactactacactccagcctgggcaacagagaccctgtctcaaaaataataaaagaaataaattctggtgctgctaattaccgtataattttaaacaaattatgtgacttccctgagactcagtttcatctctcctctcctctcctcttcttttctgttctgttcttttcttttcttcttttgacagggtttctctctgtcacccaggctggagtgcagtagtgcactcatggctcactgcagccttgacctcctgggctcaagccatcttccttcctcagcctccctagtagctgggactacatgcgtgtgccaccacacctgagtaatgttttttagagacagggtttcgccatgttccccacactgctattgaactcctgggctcaagtgattcacccatctcagcctaccaaagcgttggaattgcaggcataagccaccatgcctggccccgagattcagtttctaggtctgaagaatgctatttattttaaacatatattgggaagtctaatgtgagaaaatgcatgtatatcatttagcacaactttgctttaagatggtcccttcatgtatggaagagagctagtgtgtggaaaagtgacatggctctaaaaagagaataaaagtcagagagtctctacatcttacttcaacaacgttggaaaatgcccttattgttggagaaggaaacgagtttatgattttagcctaagtgatgatgctgacagttctttgccaggaaatcactatgtcttttcaaaatattatatattctcagctaaggcttcattttacaggaactaatccaggaagtcttctatgaaatctctgaatgaaatgaacaattcagtttttaatttggcacctaaaaaagctagctgaaggaaaagaatgtctttgcagagacatttctgtcataatgagatagaatggtttcacttgggaatagcacactaatatgtattgattagattggaccagatctgggtggtccattggtggaatttagacccatggctcttacattctaccctcagttgtaactgacttacctgcttttatggtagaaaaaaacttctgggagcttagctaaatgattcttagctggaaaaatgccatttcaatttcagatgtttattggtcataacatgtgaacctctcctgccactgttggagagctacttttaattgaatgcaaattgtgttttcagatttctataaacatggcatttttcatgggttggtggctctgcccactgtggagaatgacaaacaaattatcatgcatcatatagcaataaaataataattcaaaaagaaaattgccctactcatattacctcatctttttggttggctggagagttacttacagatttttaggatactagagtgacttggtgcaagagttggggctcgtatattatagccattcataggtgcaagcaagttactgccttcacaatcagttcttttattctgtatatgaatatatcttctttttcttttttaaacaatactgcttgcgagtataatttatttcttcacttctgcctttgccctttctaaagtcattcactgtctatcattgcattccaccagtggaggagagaatctaaaaagttttgattaagctttgacctttcgtactggttgaaattaacgctttacagaattattcttttggaccataaaatatgtgtgtgcatgtgtgtgtatgtgtatgagatatagatatagatatagatatagatcattgatacttgcatcatactttacattttataaggcatattttcttattttgagtcatttatttatacaactcagtggcttagatttcatcccatggatgagggacttgacgttcagaaatctgtgacttgtcccaagtcaaagaacaaataggtagttctaaaaagaagagaaagtctactccttatctaaacagcacattttagggaagaatctgattggccctgattgcatcatgtctgaccctaaaatactgcatccagggagattaatgcctccagctgagtgggggctggggcacatatccactgctgtgtgtgttggggttagtgagggcagatgggctcagccccatgggaaccacatggtgtagaatcattacagagaggagagttctgtagcaaaagaagggaaaagtgagctagacaggaaaacaacaacacaatcattgacaactgataagcaaacaaccttagaaaaatcagaaaataggtattagtaacagaattttaaaggaaaattaaaaataggtgttgttgaaaattgtgtttcattgggcagacaaaactaagcaggatgagcaatctgaagaaaataataagctggaaaactgaatataattgcagtatcatttttttaaaagactcattagtacctatgagccattataattactcttaacagtgccctctttttaacccaggaaattctgcattttgaaagaaagtagaaaaacgtagacaaatgagttacagttttgaaattagaatgcatgggaagcattttgaaatctgtaaaatattctacctttgatgtcaaaagtcagagtacttgatatggatcctttaaaaaaaatccatgattgaggagattttgaaaaattcctagtttcttttaccagagtaattgtatgttgattagggtttgggtgttttttgttttcaatttggaaagaaaaagagcgtgcttagcccattccatataatattgtatagaaaactcaccaggtcttgttcaattgtgagataacactgattgaggttttatcagacttatagacatcaccatttaaacctaaacgaaataacaactccggtagttcatctgtgggcatcttccacttttctctgtcccactctgttataatgcacctcccatacaagctgtgaatacttaattcatttctttaataacttgctgtgtatacatagtttagctaatcatcaaaagtgttggaatgccacttttcattttatctcttagtctaccaaaggtcagcaaactctcaaaaaccaattaattgggtcactgtggcttatagcctagagctatgctcatctttattcaagtccataaccatctctgatttcaggtttggtgtttaggttgaatttatccatcaacgatgggctctttggtttgttctttgctgaggtattctagcactacctcttgagtgaataccaaactttaaagagctttttaagaaatgtcagaaggagagagcgagagagagaatgcctggctttgtgaaatgttgcagaaatttgtatttgtaattatcacaaatttaatcagtctttcctttaaatttttaaagcaattttggactattctcattatttcaatggtagggaaagtaacatatagatagggataggccaagtgacacttaaggtcaaatagcaagtgagtggtgaatgtaggtgaattaaaattggatggccctgtttttgctgtttgatccttagatcactgaaaactttccctctctttttttttttttcttttttcttttttttttttttcttgagacggagtctagctccgtcgtcaggctggagtgcagtggtgtgatctcggctcactgcaacctcggcctcccgggttcaagcgattcttttgcctcagcttcccaagtagctgggattacaggtgcgtgccaccacgcctggctaatttttgtattattagtagagatggggtttcaccatgttggccaggctggtcttgaactcctgacctcaagtgatctgcccaccttggcctcccaaagtgctgggattacaggtgttagccactgcgcttggccaaaactttccctctctttaatgaaaatgaatagataataaccaggtcctactatatttcagcatgaggctaggaaatgtgtatgcatatttcttgggaagtgggaggtgggaggtgtaatgattgggggagataaataggaaatagtccttgggctgaaggagttcgcagcaaagtaaaaagtttaattgtgattaattgtgcataatgacacgtaatcataatgggaagtaaaatatggcaagaggaagactttcaaattaagtttttttttttttttgtaatattccttaagatagaaaagccagccgggtgcggtggctcacacctgtaatcccagcactctgggaggcagaggcaggtggatcacaaggtcaggagatcgagaccatcctggctaacatggtgaaagcccatcgctactaaaaatacaaaaaattagctgggcatggtggcggttgcctgtagtcccagctactggggaggctgaggcaggagaatggcgtgaacctgggaggtggagtttgcagtgagccaaaatcgcgccactgccctccagcctgggcgacagagcaagactcatctcaaaaaagaaaaaaaaaaatagagaagccatttgtggttatgtaatttaaaagaaaattttggccaggtgtggtggctcatgcctgtaattccagcactttgggaggccaaggcgggcggatcacttgaagtcaggaatttgagaccagcctggccgacatggtgaaaccctgtctctactaaaaatacaaaaattagccaggcatggaggcacatgtctgtaatcccagccacttgggaggctgaggcaggagaattgcttgaacctgggagcggaggttgcagtgagctgagatcgcaccactgcactctggcctgggtgacagagcaacactctatctcaaaaaaataaaaataaaaaaggaaaagaaaatattattattattactatttttattattattattttactgttgtctgtctcctaaaatagcaaattgttgtttctacttcatatttataggtcattttactaagaaatcagaatcctgaaatttatctcattttaaaagatgatgacattctataatttaccgtcaagaataaaagattagtgatgattgaaggtgctggaaattaatttacactaaatagcattttgaaaatagtttggggaactttctgaaatataactagaaacttttagaaaaacatgactatagtatggtaagttgaatcattgttgatgagcagacacttatccttgatacagagatggatttgcaaaggctatgttacatatccgaggagatacttttgtttaggccatctggaaatgtgtgtatatgaaaaggttgcaattttatttttttaatagagaccaggtcttactatgttgcccagacaggtttcaaacttctgggctcaagtaatgctcccacctcagccccaaagtgctgggattatagacgtgagccaccatacccagcttgcaatttcctgaacttgttttattcattaagtaagactagttttgttttttaatttttattttttaaagacttgagttgatccaaagaagagagaagtggtaaattttaaaaaggatgcctagttataatcaaggaatccagtaaagtaaattaatctgttaaaattataaaacaaaaattttgcctgtatgatcattcctccctcaattttcttaaaattcatgtattaagagcagtgactaactgacaagaagcttctgtgccatttgataaagatttcaactacaaatgggaattaaggtatattaaaaaataaaattctgcatgacaaaatatttaaaatgttagtttttaatgttctacacaaatattgtcctacattttaacctagaaatctacgtattgaatcagcctataaaaatccatttctttcacaaataatgtagctttgagaacagatttttttcaataattctcagtctacaaagctatgaaaaggaagttgctgttgctgcattttttttaagctgtaaaatctaatatgccccagctctgatgaaatgtaccaggaggaacctgccttgtcaaacaggatatttttatgatgaaatgtgatacgaagaggcatagccttacatatatctgagagaaaattatttaagtggccataatagatttttcagaaattttgtacatttctcttatttgatccagatgcatttttttcctctgttgttctcataccagcttcttaatttcacctccctaatgttccacagcataaatacatctttgttcagagtttctccaagttatctgtgagaaaataaactatacaaagggtccctgggtatgttttaggatacatagattatgggggtgggagagttaccttgtgtgtgcaaatgagactgtatgtgaaacgaagataaggtttggagggaaatagatgattcaaagatacctaagaggtttattaagacctttaaaaatgattttacagtgcctgtaaagaggactgatatttaaactcattcagcttagtgaaaaaaatgaagaaaaatggaaagtaacatgcactacatgtgtacacacagaaacaagtataataaaactttctgccctttttttttttttttttgatatgaagtctcgctctgtcacccaggctggagtgcagtggcatgatctcggctcactgcaacctctgcctacccggttcaagcgattctcctgcctcagtctcctgagcagctgggattacaggtgtgcaccaccacacctggctaatattttgtatttttggtagacacagggttccaccatgttggccaggctggtctcaaactcctgacctcaagtgatccacccgccttggcctcccaaagggctggtattacaggcatgaaccaccacgcccagcccctgcttattttttaaggtttctagaacattggctgtgaacttttgggtaaatagtgcacataactcttctccttcctttttatttgaagtgcagacctgggtatattttattaaaataatggtctgaaattataaaaaatgttctttgtccaatcaaggagtaaaatcaaaccttgtattattttgtagttatactcagatgttagactatcttctagtccccagcagttcactctaggtggtcccatagctcttgcttgaaccacagtcttgccacttcttatccatagtgatgtgcacatcagttcccacaccagaatgtaaaatactagagggaagaattttggttgatttgtgtttctattcccataacttattactatgccagttcccagggagtatttattaaatggatgtcaatatcaacagtgagttaatgaatttttttgttggattatcattttttaagttgtacacatttacaatgaaaagaaaaccaccttcactttaaatcatgggcacagatatttaagtattttaaaatcaaagttttaaaaaactaacattggcttaaataatatttattagagaacttgtaacattttaagaagcattcacattctacctatgtatattttaaatttatttctgttttttacatctggaagatttttttcattttatcataaatacttgttttcatggtaatttataaaaatcagtttctcctttgataggattattacaaattatttcagaatctacttattaactggtcgctgttcctctctgtagtgctgaagaggcacttgcttgggaacaagagaagtgccgcaacagtgtcaataacatggatttttcatttattatctttaataataataatagatgacaataatatattttaataagcatctactatgtgtcagatgctttcttctgagaatggatattgttagtcccattatgtagatgtagagactgatactcaagacaattcaatatttgtcaagtagtggtagaagcaggatttaacctcagtctttctgactcttcatcctgtgttcttttcacccacagatggtagaggttgaaggctcagaagaacactttttgagctcagaaagctcttcttgtgacctctatgctactagtctaaagggcaaatgataattgcagctactttcagaaatggtcctttttccctaatgagatgaccaaatctgctttatgaacccagtttcctaagcaagatacagaaatagacacaccaatttagtatgataaaaggtgttaaaggtagaacaattttaggtaccaaattatatttatttgatacttggataatttaaaaataatgccacaaacttcatcccatctacctcccagtgcgcacacatttgggatgaagagataatgatgagaatgacattgtagataaaaggtatatgcattaaacatctgaaatgcttaggttattcaaagaaaagaataaacacaccatgtgatatgtagcctcagctacttcatgtttgaagttgatggtaacattcagatcagttttgagaagcagactgcaaccatagcttttagtttaagtttcagattgatatggaaggttatttgttttaacaatccctatgttaagttttcttttttctatgtttcaattgacttattttgtcagattttaggtttttttttttttttcaggcaagatggcattctcatccctgctgttgttaacatttaaagcatgcagcctcttgtgctgtggtgtaaattccaactgactgacgataattaaacagaaaatgaaacttgaatggcactatctcaaaatctacttaaagccacaacaggtatctgcctatagcaatatatcagttggaacacatgaagaataagaaattgtagcattttgtgtctgggtttatttttctttgaaatcaaagaagaaaaatactgatttttcctggatcactaaaacagtagtatggatttctaaacagggcagaccatacaaacacacaattaattatatctgaacttgaaatctcatactgtgcactttacctcttttataccagttgtaatttctcatttatgtacagatactgtagtaactttttttaaaaaaaagaatgtattattgtaattaaaaagcaaatactcaagaaagataagacacaaaggattaattgggattacaactcttctttctgtattgagtgcaaaagcttggtgatctcctgaattgtgcttcaacagtgacctcaaggctccttccaacccccaaggctctccttttttaacatttgttattacttagctattttatttggcagggatcccttctatctcatcttctaatgcactggcaatgatcctattgccaatagcttagagcctactgctgctggggtaagcgacacagccgaactttctagcctctgcatccttataaataatgcatctggtttcctgtaactacatgaactcttagactttagtaggcatttctttgttagtcagggtaaaagagttgggagatgaacagttgtggaaatagttataggcagttattatcactgattagaacctgagtccatgacatatgcattaatcactgggttaatgctaatggaatgcttatggtatttatagtagatataaataagatatagaaaaagaatatctttgctgaccaaactgcatgcttaattcaacatggaaagttctggtgaggttaatctaggacgctttgagactccgttgctcataattggacctgatttactactcatttaaaaaatctcttttaatttgcgcagaattcgctggctttttgggggtggacacacttgttcttaagaacaatagcaacaagatctttgtttaacataatatctaatgctccatgtaacttagtggtataacaaattattcaatttgtaatgaaaaaggtaaatgctgtgttaataagttaatagcaaagtaaataatgcatatttatacttttgacttcaaagtgtttataaacttatggcattaaaaagtaatgttttatttttgagcatcagagaaaatagtatttaaacaagagaaaccgatttttaaagtgaaaatcattttagcaacattttaaaataagccacgttaatataaaataagtgagttccatcgaagtatacactcttttcttcactagacgtgccttaattggacatgtcactggccaggcgtggtggctcacacctgtaatcccagcactttgggaggccaaggcgggcggatcacctgaggtcaggagttcgagaccagcctcaacatggagaaaccccgtctctactacaaatacaaaattagccgggcgtggtggtgcatgcctgtaatcccagctactcgggaggctgaggcaggagaattgcttgaacctgggaggcagaggttgcggtgagctgagatcacgccattgcactccagcctgggcaacaagagcaaaactccatctcaaaaaaaaaaaaaaaaaatggacatgtcacacagtgacaatgttcagtgttatgattctatcataaggataaaaaattcagattgatttagatgttgatgagaaacttgttgctctagagccttgtatattttcatcagaattaactgaaagaagggaaaattgtttctaatatgatacaggatgttcatcctgatcattttattattgatttctttagttaccatcagttcatctctgagcagctcattcatttagaaagatgatagcttgtaagtttaattctaaaactcattctcatccttgttagcatttgacatgccaatgattttgcagagctgggttgttatcaggactcatgtttagtcaaaatgtttaacacttatttctttgattcctgtagaatttccttattaattaacccagggtctataagcaacaaatttttaaatcagatatatatctatatgcatgtaattcatttttttctctttgatttttgactacttttttatgctgatattttagaatttctatgaaattaacacatttccttaacaattcaggaaatctgactaactgtactttaaaattgtgctttggtatcaccagtaaataagaaggcttcaattcatcaaaaagataataataaactgtattaatgctttcttttatttatttattttaatccatctaccaaaaacaatcaagacaacagctttaaaaaaatgcaatcattaaattactacgacagcctagtctgcttttgtggctgttttgttttgatggttaccgagaatggaaacagacagattatgtttttctgcttgtaattgtccagtacctccaaaggcctcttgcctgggcatgatcccttctggaattgaattctgcattcttcttctatcactaatcaaacaaaacactatcagaagaaaacatttccataactggatccggagtgaaggaaaatttcagatacttagacatgcatatacaataaacagtgtttcctgacaggctcattaaaaaagaatgactccactatgtgtcaactgcacaaatagaatccattataagactatggactcttacttctgaagtctgcctttgtgcccacctaagattaggaaaactaaatcttccactagaatttaaatatcacagaagcagaaacgattgcaatctctttccccagtgccttccttcctctttctctcagtcttgggtaggtcctggtacatatgaggcacttgcttaaaaaaataactgaaggaacgaatgaagttgcttaaggccgggagcagtagtctgtagatgagtcgactctcacctgtagtcccagtactttgggaggctgaggcaggaggatcgcttgaggccaggagttcgagactagcctgggcaacattgtgagatcccatctttacaaagaaattttaaaaattagccaggtgttgtgacatgtacctgtagtcccagccaattgggaggctgaaacagtaggatcacttgagcccaggagtttgaggctgagcaagatcttgtcttaaaaaaaaaaaaaaaaaaaggttgcataaagcagcagagacaggatcaacctagaatgtctgtggaaaaactttgaaaaagcatacattcttaaaaataaatgggaaatctgtggcagaggaaacagtaactactgacctgatcttcccttttcattttattttaatttctaatttgctgtaattgtatggtgctttcaaatactgattaaaactcttaaaaaaatgaaagagagaaatcacatttttctgctaaactgagtttgtggcatgccttcttccttcatcttgttgatgctcaaagaattatgcaacagagggccatcatactgtttagtatgttaaattattttgattcatgtacttactagcaacatcatttaaatggtttggtttcgtcatggccagacttaagacacatagcataattaagttgacaacctaatattccacattaaatcctggtgttggaaaaagctaaactgatcggagaaataaatctgtccaaagtagaaactgtaatatgtatgtgaacatgtatattctcatcatcactttttgttttcttcttttgttctctgttcctcctgttgagtcttgtgtaagtccaaataaaaattttattgtagagcccaacaacaaaaacaatgatctcttatgtaattgatgattttaaaaaatgctttgaaagtcttcttcccatactttgtatcagtataaagatattgtacagtggtacagaaaaaaatggcttttgaagttcagatggtttgaatctttgcttcaccacttactagctatgtaattgtgggttatctgtgcatctttttaaattctcactttttccatctgtaaaataagaacaatatcagttactttgcatactgattgtaaagattataaataagaactgatgtatatatattacttggcacaatgtctgacctgtttctgtttttcacagtcaggcttctcttccattttctaaggtgactcggaccttaccactctaaaaattcaaatcatgccttcactttctgcagattgcacttgttactttagaagaaaaggaaaactataagatggaaattattttaatgtcctcttaccaaatctacaaaccccagcacaatgcctgtcacagatacggtcatttagtaaacatcttttggatggataggtggatgggtagctaagtaaattaacatacagattaggtctttggaaatggtagctatttttattacaccctgtacagtgaccttaaaatttgaaatctactgcttttgaaaagcaggtcatcctgaggttttccattttgtacctgccagattgtgaaaagaagttcatttcaatgctgcacagcacatttcctgatcagttggctgaattacagtcatgccatttcattttgagttggacaattcaagcatttagccctgatttttttttttgacagtaagttagttatttttatactcattcaacacatttttcccccaccacaggttattgtaaaaccacctgtctctgggagcacagttaattctgtgcatgagatttctaaaaatgttttacattgtcattgcagttttttaaaaatgtagagatccctctgctattcttttgcattgccaaatgcttaggtaccttggaaaactgcttaattggttcttcttatctcactagattctttggccttaggttgtgaatgggtaacaatcatttaacttttgatgtgccctgaagtttccatccaaaacttttttctttgaatcttttttagggtgaaagagaagaatatgggggatctaggtgtacattgatactttttagatgcctttgatgtcagtcagtaaacagcagtagacatttggaagagcatgatagaagagacagggctaattccaggtatttaaccccaagttaaggagacttaacctgaggctgggttatttctctgatctctagggacagagtagtggcaaagccttaaggtggtaaaatttttgagaaacacttctaaagacttatgttttgttttagaatcctatctaaaagcatttcaaacaaattaagttaagccgttcctttcttactggatgtgttcgggcgcagggggtgggggcaaaaagaagcatatggttgaagctctgcactgcagtaatttgtaaaagaagtacttttcctgctaggttaaattgctctgcctgcctcttgctgtcagggacatgatttagttaaatacggatgcttttagaggggctttgtactgcatcatacatatttaatagtttataaaatatctgtgtgaatcactgggtggagaatccagcagcagagaagctcaaccttcacattggagcctctggccttagggtccactgaccagttgaccactggaaaaggtgtgttcagaatgggagcgtcctgaataacccaaggattctactgatttcaacagaataagcttagcatctaacctttcagattttttcagtaatgtgaactttacattttctcaagtcacattattcatagatgttctaattccccagggatcgaagtatagcattaaggaaaatcccttctcaataaaaaaatggtattgggtgaggggagggggacagaaaaagctcttagatgttctatagcaattaatggttgccatataaagatacctcattgtcattagataatggttaaaattatatgaatcttttacccttgatataattttgaaattcatcttaaaaatcaattccttaaaataaaagtagtaggggaaagaggtagtgatgggtggaggctgggggatgatgcagagaaggaaaaaaataagcaagtggaggttactaaatgtagcattggtggattattttgtttgtttggcataggtaatgagttttataataaaacttactatagtatatcaagataggctcctttcatatatgaacccagaaacaccatgaaaaattttttaaaaagttccagcattttattatgaaattttcaaacatagagaaaaggtgaattaatcattcagtaaacaaacttatgcccactaccaagattttacagttaatattttcctatatttgcttactgagtgtctacccatttatctatcaactttttatttttgatgaaatttcctgtatatatgagttcattttacccccaaatatcccagcatgcatagtatatatattttattacattgtttaagagaacatgtaggtcatggattatgctatcaaatagaatatatgtttctctcaaataagccaccatatttggaccgagggttttctagtcatcatatttcagagtataactcagacagtagcagccttcttgttcctgttccctaataattactccttcccctgtcccaggcttttaattctccaaattaaaagaggatgtaacctcggcttcctgattcccagatactgataatttttggtacagtttgtgtttgagctactgcagtaatgttcgggcgattcccattttggtgacagtcttctttcctgaggatacattgccttcctatcctctgtagtttctttattctatactttcctatgtaagcaataaagctaattgtaatgctcccacaattcaggtagcgtctaatctccagcctgttctcaggggaagttgttgggttctggagcacacattttgtgtgctcccttagtttgacaaaatgctgtttaataacagagtccaaatatgaatattagtctctgaatatctttcagaaagaggcccattaagtagagttgtgaccacaagtggtcgtgggagcattaaagagtaaactttcaagtagaaatggtccagggaaacagtcaaagtgaggtattggtacagacatcattcatggctctaggcgagagaaagtctaaactatctaatcaagtgtgtgtatctgagttggcagtatgcaactaaaagctttcctttgtagaaattaattaaaaagaaggagaaatagatgtgattcccagtcctgactttgaaattaatttctgtgtgactctaagcaggttttttgtttgtttgtttttacctcccaataactttttttcttcttgtataaaataaaattcatgtaatgggtgcagcaaactaacatggcacatgtatacctgtgtaacaaacctgcacgttgtgcacatgtaccctagaacttaaagtataataaaaaaattaaataaataaaattcatgggtaaggcctgttgcagctccaacattcagtcaataaaaaaaatttaaatctaattattattgagattacagttgacctttgcattaaacctaaattcttttactccaaataactactgaaatagaaagaaaagacacaagtctattttcttttttctcccagtgtcttagagatatggtctccttctgttgcctaggctggtctcggactcctggcctcaggcaatcctcctgcctcatcctccctagtagttgggatcacgggcaggagcgaccatgttggacagaaaagaaacaagtcattcttaaacaaatctgactctagcaacctattgtataatttatggtagaaacatttgagctggaggtcaaatcataagatatttttatcttataactttcaaattcatatcgttttaagtaataaaaattgtaacaattttctgtaaacagaaaaggtttccaccccttgagctgaaaagcagcaggaaaaggagattggcatttcattttaaatgggatacgtctgcttccatgagcatcataaaggttatgaccttacggtagtgttgcctgacaggtggctcactaagaatgccaaatcagttctggaaactgcatatacttttatttcttcttttttttttgttccctttggtgcaactttgtattttcattttgatcagcaacaaggagaaaaaaaatgtgtgtactctaaggaaaacgtatattgtaagacattttctctggctaaggtcttttcaggtttagaaatgtgaactggccaggcgtggtggctcatgcctataatcctagcactttgggaggccgaggtgggcggatcacctgaggtcaggagttggagaccagcctggccaacatggagaaacctcatctgtactaaaaatacaaaaattagccaggtgtggtggtgcatgcctgtaatcccagctacctaggaagccaagacaggagaatcactggaacctgggaggtggaggctgcagtgaggtgagatcgcgccactgcactccagcctaagcgacagagcaagattccatttcaaaataaataaataaatataaaagagaaaagaaatttgaaccatgtttaaaagtagaatacttcaggtaatccctttcctcaagctttctttattctgggaatgttgtgcaagtatattttatacatgggcttatgtgaagtttcagtctcttgaatagctggtactctcttatgagtaattcataactgccttcacatgtgtataatctcatgctcaactgtttctctctattttaagcaggagatttaaaaatcaaattaacacatatttctagagcatttgctataagtgatatgctgtgctatatactgactaactacatttctgggttgattgggggaccagtttatagaattggctgacaagcaactgaactttaaaacaaatagctagtgcttaagtataagtcaagttcaatcactcccatttttaaaactttgctgaatttatattaaaccgacattggttattcaaggtatttcttccttgtttttagctaaaacttctcttactgcattaaactacatccattatcattttcattaaataagattgcacattggatatgtacataaaagcaaaattatatcttgcatttttgttacatttgccagaagaatgaaaaacaaacaacagaaaatttctctgagctgtgctgctctatgccctgaacgtaactgtaatagtgaatattaatgagacacagcaaagatatttgctcaaggtagctaagccaatatgtattgctccagtaaatgttagaaatgaccattcatccacataacctcagattagtctgcataaagataatgtttcttttgttttttcttctttttgtcacacacacacacacacacacacacacacgcacgcacacacaccacacagtaatttaacattatttgcatttactcacactggtaaaacacacgtctcaaagatgtttcccatagtttattcatccctcttctatgtcgttttcatttggatgcatttgcttaacaatgtctgctgtgtgccaggcatgctctaggtactggggatatagcagtggacgcagacacaagtgcatggtcttatggagctgacattctggtattgagtttatcacgtttgataagaaaacacagataatacaggaagactgccatttgcccctcatccttggcacttatttccagtggagtccttcatcccaaagatctcagacccgcacacacacacacacacacacacacacacacacacacacacagaaactagtaaatggatatgtcattgagactctgaattcaaaaggcttctgagaacatgagcaaaggcttatctttctatcccattttatatactaaaatattatttttctgttcaactccatcctatttccctatttaaaatatacatatcggcaggcgtggtggctcacgactgtaataccagcactttgggaggctgtggtgggaggattgttgaggccaggagtttgaggctatggtgagttatgattgcaccattgcattctagcctgggtatgaaagtgagaccctgcctctacaaaataataataataatagttcaaaaataagttagccaggcatggtggcatgcacctgtagtctcagctacttgagaggctaaggtgggaggattgcttgagcccaggatatcaaggctgcagtgactaggattgcaccactgcactccagcctgggagagagagtgaaaccccgtctctaaatatatacatatatatatataaatatatttttatatatgtaaattaatatcaagttcagagttcatagttaataattgcctgagattcactgccatattgcctattgatactttctagaagaaagggtagccgacacataacaaagtctcatttttccttgagttgaaattcacacagcaaaattaaccatttgaaagtcaacaactcagttgcatttattgcactgttgtgcaaccaccccttccatctagttccaaaacctctccagtggaattttaaaagaaggacaacttgtaaaatgaccaataaactgtgtttgtagaaaattaatgattttacttatggagagtgagaaattaataggttctcccaaagtaaagcaaactcactgtaactatcgtatgcaattaaaatatctttccatatgaaattctcacatcctcatctttgagatcatttactgtatcttcagttacagaggatctaaactcataaagaacaaaatgtaccagagtaaattgctcatcgtgttacagaatgagaacacagagcacagtcaatatcaagtacttgatacagcatctcacaaagtaatgcttaaaattaagtcaaattgtctgctctgagaacattttcactgggtaagaataatcagtcttgactcacctttaaagtgggcagaaaagacatgcccaggaaggtaaaatgagtttcattcatctcacctattttgcatcataaataatgtacaagaacatcacacagcacatggatttggtttgctctcagagaacttttctatttagctggggagagaggaatgacaagaaaaaatagttaaatattagcatattccaaattttccctccactgataggatctgtggtagttgagtttcgctagatcaggctaaattaattcaaggcatactttggaacaatcagagaaaatttgataaggaagtatctgaataggccattaaaagacttgaaaaaatggagaggaggagtatagagggtattttagatagttggctatgaataaagcctgctgatttattagagaccccataatctgtgtaatgcaatcccaatccaaagtaaaaccaaacaaaatgtatgtattgaatggacagcccagctctaagtttgggacaatcaaatactgatagtctttgccttcaaataaattgcattcttcagccctgtatacacgatgtaattaaatgatgacacatgactgtgaacatgtaccccaataaatggtacagttaagaaatgctgggtctatgatttggaaaaatgggaagggcttcgtcaaggagctgagacctagctgagggcatgttttttggataggtggaagaagctgacagatccattggtgtactttatcctccagagaagctgcaagttttgaaagtcaacttcaggacatggagctttcttgtgaaaattatgatttcataattcctcagcaaataaataaataattgccatttgtatgtagggatctctccaaatgaaacgactgctgccatcatttttattttatgttagataccatgaagtaaattctactcttttgccagccgtaaaatttaggagcaagaataaactttttcagtgataatatttttagattttggagataatatttttagagttatattgccaagatacaggaaaaaagtcaaagagaaaataagtgagtaataaggtcaaaagcaaaatgtcatttatcattctctttcatctgttggagctaccgtacattcttctgatgataaagtaaataaaagtaaagcagaatgactagcttgaattcatagcctagcttgaattgatgtagctgaggaattctagtattttttatttgatgatattacaggatgtttttcttcattgaagccagcttagaaggaagctgaaatattatgaaagtggatcagaaatacaaatatattttactttattctgccaaatcccattctatattaccgtgtctcttcttgatccaggttggcatactagcatttacttccttatcctctgtggcagattaattgtggctgcaaattctttgccactttctccctcaagatttatttcttctgtccttgagtctgggctggcacggtgactgcttaaccaataggatgcagtggaaatagtttgttctgctttcaggcacagacttttaagagaactggcagcttgtgttttcttcttcttggggtgctttctctcacaacctggccaccatgctgtgggaagctcaagccacaaggagaggccacaggttggtgcaccatttcacagtgccggctggcatctagcagcagctgccggtcgtcatgtgggggagccatcttgaacgtttccacctagttgcacctcacctgcagcaccagctgacgtcaaatgaagcggaagaaccactcagctgaacccagtaaacctacagaataaaatggcggttgttgtaagctatttccaggtggtttgtttcacagcaatacataactgaaatcgcttcccaaggaaagtcctggaatgagaccatggaagagctcatttgatttaaatgataaatagacagtatttaaatggcctatgcttaattcttataatttctaaaaattattaggcaaaattgtagaagtcttattttggaaactagatccttttaagtttgtttacaaattatattaaggtaataattcctatttcattgttacatattctggttctcatagtctctccttgaagtggtatgtaatcaataatataatcaaatgcacccttttgatgaaataacaaaagcagtatttttcagcagaaataggatgaatcagaacgtactcaaatcttggccacatagctatgtgtccatggcaaaattacctaagctgcctgggccaatgaaataaaaaaaaaatttaagataaatatggactgtatgggattagtgaagatcagaaataatgtatattatgaacctagcagagtgcctgtcacctgggtggaactcaacaaaggtagcttttattattgtgagggagatggtgataaaaggttaggtagtaaaaaattgtgtagtttatttttctaagaggacatggaaatggggtgttcctgggctttactggggtggagcttaaagggttaaaatgatatatccttgcagtttttcctacaaacatgcatgttttatccaaaggaaattctgacctctaaccccattcacactttcctttcttactcttttattgctatagaggatttgatgaaggcagaaaggcaacttctgggtcctagtcccaagggtagaactaatggagaattcttttattcttcacctcccatccttctccatttccccatttacattctttttccaatttggcggaaaaaaagcaatgttataggaagctggctgtctgcagattagtcttagcaccaaggtggaatgacttttgggggaaaaacagacacatcccaaagtctggctcatgtagtccaagggaaagagtacttgtggcagtccataggattctctctctgatgtgttgtcctagtctttgtataaaatgttggttttctctgtaagtgttgggtattttcagtgtaacagctagagcaatgcccagtaacttttttttttttttctgctgaatatgtttgctcttaatggttgaggtaaggtgaataattgctcttggtgtaagttaaagaccacttttctaaactatgggttatcatgcttggtattttctcctatctgcctgacttgaggccacctgaaccccattttggtctttgaaatttagctgaccttggccttggatgaaatgctggtgtattgagtataatagttttggtttaggtcaaaattggggaattcagtgccgtatatttcaactgggtgctttttgaagaaatcataaattaccctagtttagcataaacacctgctgatattgtttctgaatatttacatgaatattgatcattgagatcttactatctttcaatttgaatgctttaaatgcttcaatagatgttttctacaccgtgaaattgtatgtcctttgctagaatctttgtaagagaggtctcactgctttgaagtcaaataaacctagaaaataagcataggaattatttttaaacaccatttactgtgcagattatagagagatgaactcaaggataactcatgttgctcataaacttgtcatagtcatggttacatttatgcaaattggcacaggcttttgttgttgttagttatagtactgcaaacacagtttaagatgttaagaccctttaaatcatgtataattatggactaatttcatcttgaaggaagaagtgataatattcttatctcctgccgtttaaagctgaaacatacctcaaagtagtggagattgtgccctacaaaatataatgtgcttaaagcggattttctcaggacttgaattctaaattttactgcttcagggactcatatgatggctatgtagtatagatttagagagagttttacagactcctattgacataagtgaacaaaatggttccttggaaaccgtttagatgtccaatcacagtaagtgtggattacaggttcagatgcatattgtgtgcagtgatgtgcagcacagtgcttggggaagcctgtggtctgtattaagaacagtgcatttcttctagtgttttaatgactgttgttttaaaagaaaaaaacagtcagcattgaaactactgaaaggtaaagctcctgaaacctaacccaaaaggcatgctctcatagaaaactcttcttagtactttcagtgcggtgatagctgaggacatgtggtatatattacagtgccagggaatccaaacctctgcagtgtggagtcaccatgaaaggctaatctaaaaatgaagtggtagctttgctcgcatcataactctgttacttactggtgcttcctattagcttgacattattagtcttctttgggtgagatagaataaatggaaattcaaaggggaccacagcaggggatatatgggctgccaacccctcccctagcactcccttcctccagcctgtactcagcatttctccctgggcatgacaaacaaagtcttacatagtcattgcaaaaagggctaaaggcagagctgtccatggttaggaaaaaaatgttcaaactgttggttgaaaatcaggtaataacagtcctcttagtgaacaaaacttattagagggctagggaaggaatgctatctctcagcagcaggcaggaagaaattgctgttgaaaagcttacctctctagggaggaatcagatagcagacttcaagcctcaggtccaacccataaggtcccacctacaccaccccccaccccatccccatcccagctttgttagattgctagcatcgatcgctggctttctctgacccaacagtgggtgaaggaaagagactgaaagctggcaaggtgggggtggaagaagactgggacagcttttgtagagaaagaaagaaaaaggaggaaaacgggtgggggccatggggactaggcttaactgatgcctgcctgcctctctttgatttgatggcctttattccttctaattggataaaataggaagtcactggcagtcctgtgtggctggggatactgattttactcagaccagcctgcagctctagagtgtgggtagagagcggggagtgggggttgggagagggggaggaaagagagagaggagagaggacgggcttggatgaagaagggaaagaaagagaaagagactgaagcagagaagagccgcagaggaagaaagtgaatgagcactcaagaaggacaaagaggagtagtcgggggtggggtggaggcagggcggggaagggagtgaccgcccctcctggctgcactcttgcctccggagccctctgatcctgtttgcagtgatgctccgagggcaggcacctgctgctctgtaatgattcagcccctttcagccgtcgtcgcgttaacacaacaggatgctgttgctattgtcactactgcctctcctgccgccgctgctgctgccgccgccgccaccgccgctggtcctccttctgcttttacttctcctgcatgacagttgttttcttcatctgagcagacaccagcttcagatgctcgaggtgagaaacatgcctttcagtttgggctactggtttacttaattaatcagccggcagctccgtcgatctattttcgtccctgtcctcttgacgagcccgggatggtttggagtagcatttaaaagaactagaaaagtggcccagaaacagcagcttaaagaattattacgatatactttgattttgtagttgctaggagcttttcttccccccttgcatctttctgaactcttcttgattttaataatggccttggacttggacgatttatcgatttccccctgtaagatgctgtatcatttggttgggggggcctctgcgtggtaatggaccgtgagagcggccaggccttcttctggaggtgagccgatggagatttattccccagacatgtctgaggtcgccgccgagaggtcctccagcccctccactcagctgagtgcagacccatctcttgatgggcttccggcagcagaagacatgccagagccccagactgaagatgggagaacccctggactcgtgggcctggccgtgccctgctgtgcgtgcctagaagctgagcgcctgagaggttgcctcaactcagagaaaatctgcattgtccccatcctggcttgcctggtcagcctctgcctctgcatcgccggcctcaagtgggtatttgtggacaagatctttgaatatgactctcctactcaccttgaccctggggggttaggccaggaccctattatttctctggacgcaactgctgcctcagctgtgtgggtgtcgtctgaggcatacacttcacctgtctctagggctcaatctgaaagtgaggttcaagttacagtgcaaggtgacaaggctgttgtctcctttgaaccatcagcggcaccgacaccgaagaatcgtatttttgccttttctttcttgccgtccactgcgccatccttcccttcacccacccggaaccctgaggtgagaacgcccaagtcagcaactcagccacaaacaacagaaactaatctccaaactgctcctaaactttgtaagtagagagagagagagagacgatgatgatgatgaataaaaggggtgggtttgaggtccccaaaggacatttccctttcttcttgcattttagttgcctggttttgtttaagcaaagcctatgtttgagatgcttgggatggcattgaagggccgagtaaaatgatcttgcaaactccggatctgaaccagtgttgtaacagcagctctctctagccacatggctcaatctggtaccgggaatgaaaaacttcagcatctgcaagtcatgcttgaatttaagttaaattcaatttatttctaacacattttaaaattaaaacatcacgccatctcttatgttttatagaaatgtgactttcatataccagtgagtattattttgtgtctttctcttccccatcatagatttcctgtcatctctctgttaccctctacctctcagcgaccccaagctgcctgttgtctctctctccttcccgttccctaaccacttctccctacttttgtatcttaattggttctttgagattacagcaagtcttaagacatttacggtgctagcctctcactagcttgagacgactgctgtcctgcccagatggcactttcagttagtgagcacttactagtggcagctttattttgtccaggacacagtaggattctgcatgaaggattttcccaaattagttttgtcttctataatcaaatgtttaaatagcttccttggcagttgttaaaaagtacaagatccattagtgaggtacatctttttttttttttttttttttgatgtatgtcatcttagtctggcagattgcagcggcccagtttaataacctgtgatgtgcagagagcccacgctcttaaaaacaatacattcctgtttgcattgcgtaattgcaatagctttagagtggaaagttgacaggaatgaaagcatgactgttctaaatatcaatatagaagggaggagttttctgtagccttttaaaaatgtttctagtttatttttgttgtctctatctcctatcactttttaccatgaggaatatttacttagtagaaaagtacaagatcagaaaatttggttcttaataacttgcatgaaagctcttagggttaaaagagagttgacaatttctctgacgaaatgcctcttgtttttcctctggacagtaatgaagaataaagaataccttttccagacatcatgttcagtgtgaagtagtgcagcatgctgtagaaacacagaaaaacttgatttgtgcttgtaactcccgatcatttcacgaacaccagattcagtggcaaagatttaaagaaaaaaaaagtcttgttttctaggtgcaattagggaaaacctccttcatgcagacgctgctttgtatctttatcaaatccctgaagcatcattaaaggtctgacagacatcactgcctttgctgcctcttcccacctggcaaagtgactgggaaataatacccagatgaaatgacaggctataaaaagcaagtacagatcctgcaaaaagaagcgaaattcaccaggaggacaaggttacttgatcattttaaacttgtctttaattgaaatctgcttgaacaggtttcattgtccagagaaagaaaaaaatgccctttgaaaaacacttcaactaaattctataattttgtcatctgaggaaatcaggaaaacaaagaaacatctaacacattttcctgatctaagaccatgtcagaaagtatgttgtgaagttttgataaattattttataaagtaaatttttctactaagtgttttagtagattacatattccttatcagtttttttttccccaagccagggcattgatattgtggcatctgcaataaatgggaaagatttactgctgcctaaaagcatcattgtggccagtttgaccagatgcacagctgcaacgttttgaagtgcatcggagataagcctagagaagcagtctgggaagtagttttctcctgaaaagttaggggtagacagttagttggttaagactttgaaacctataaggaaactctgttaattttttagactagttccttaaaaaaacatcaaatcttgtattgtaaaaattgtgagactactttttttgggggtggggagaggttgttgtggggagagtagtgtttgaaagggattggtccaggcagctttgtttttagagacttgtaagtggttgtttttgttgttgtttaaaaaggttgtaaccactaattaatggaaagcaaaaaaaaaaaaaaaaaaaaaaaaaagcttacaaagggattgtatttttcaactaagaaagtattgtttagtcacagaaagaactgggacgttccttttcccgtgcatgtttttgacataaactaagctgtcatggcttatatttgaaaatgacattatcatatgtgaaacatgctcttcagtggttttaggactttattctcccgtttccatttttttttctgtctcagcatattcagcacattatgcacagagctgtagccttcaaggtcatagactgttgaaggctaattgattcttctttatcctggagcctgagagagtagaagagagacaatcccagtaattgtgtctgcagcgttgctccccaaaccaatctacctactaatgttagagttttattttataaatactagaattactccctcactgactcttgtcaaattacaacattctttgtctttgttataataaaaggcaaaatatgacattttaaattgccttaaggtatagtggctatgtcgaattttctaaaatgggtatttctttcataaagtaatatttcatattttcatgatattaatctatgcattcatgtaggtcttaagaagtccaatgcagaattggaatgaaagtatataagtatatatttttattctaaagtatttctaaatatggttaatggtttcccactaccacaatgattatattgtcatgatactaattaagtttttacttctcaatgagtcacataatacttgcactattcatttgttttgtctgggctttaaaatttttcctaccctgactgttgggagattgcaaacttagattatcataaaaagagctgattaattaaattatagccaggaaacagtggtaccatcttgaaagaaaatgttttctggatatgagatcctccctgcttgacaacagattcttggatgcaagaatgtgttggtattttcatcttgggccaactttgttttgctttgtcctaagtcttattatgggattgtatgacaaaccattgttaccgcagtgacaataagaatcagtaaccatttgcaaaagatcaacatgatgagttggatataccataggatttctttccttctatttgaaagtgccgttcatttaaattctaatgcatccttcttctagttcttggtaactatgtttgtaggtatttcagaacagtgattttaaataacttctccccactttaatcatagccgattacagcctaaaatattaaaaactggaagagactgaaagatcttctattggaactgaataatttcataaatttaccaatgaagaaacccaggctcagaaatgcctattgaaattcttttattaaaatatactaaactctgaaaaatgtggcaaaatccaaagtattagaaaatgtctctgtctctgagaatttaaacacacacactctctctctctactgttttcttctatcatcgtatccttactgtagagagttggagctagagacgaatgtagcatcagactgagaattagggaagtactttaagtgggaccactgttcaggtgtgtgtttagtgcatatcactaaaattaaattttcttctcgccttcctgttttgctcttattaaattttcagtcgtggtggtcttttccctttttattagatcatccatactttgttcagcttgcttctgaaaacagcatgggttgcctagggtgagttcttccctcatatatagcagattgctctgtggctcacttcttttcttcataacccattttgttttctcctctctattcttttgtgatacccaactcagacttcttctcccctttccttcctaccttcccaattatgtattgactcttttttatttttgtaattatgtcattttggctttataggtcagtatttcattgcatcatatcaaaataatttcaactgtctttaatgaaactttattgcattttaatgctgaatggcactttcatatattacaaacatacaaaaaaaatctctagccaatgaccaatataccagtttcttaatgacataattaaatcaaatttttaccttcttcttgatcttttcctcttttttttctttagtgtgcttgattccagtttttctgtttttggacatcagcatttctgtactcccagaaaacgatgttccaaaccatacatctgtgttcttcctccttccctcttccttttaacaactcttcatagtatccttttaaagtatgaaggaagaggtattttatagattgaaaaaccaaagcataaaaagttatgacttgtttagatgcccctgagaaccaggaatataacttgtccacagagtccattgaacgttctactacagcataaactacattccgtctacttttatgctcatgtttctacttttattacttttgctctacatcaatgctttgtttttcttctattatttcctctttggtttttttttgtttgtttgtttgtttgtttgtttttcattcagtgaatgtacgctaagtgcctactctgtgccagactctgttctagaccggttatatgacagtggaaaacagtagagtgcctgccctcagggagcttatgttctagtggattttaagaatctaattgcataatgcaatttgagatatttcttgctttcttatacatataccctcttcattcagcatttcttcttctttactgtcatgttattcaccttttgacttccactcctgtcttttcttaatatgttttcttctccatctaccaaatactgaacacttgcccagcaatgtcctttaactgacagcaatcccacctctgctaccaacaggctgagtagccaggggtgattcaccatatggcactatctaatcaaaccattggagtagtgagaaaaatttgatctgtctggccctttaggagcaccctcttaagatgaaaaatatatacataattcttctagcatgtacataaagattctaagattattttcagattctagagagttggtagctgtaaatatttttgtttctatattttgctcatatttttatgtattgttttggcttgcataacatcaagagtattaaaatattcccaagggtttttcatttcactgtacggacaaagactagaatctgccattaagttgtttagttcttaaactgaataaagacatgagttcatatactattcacatgaagagtgattgactagcagtgagtgaagttaatcctcatcatctcaaagctgattgtaatctttactgcagtgaattttatcgtgtgtatgcgtgtgtgtgtgtgtgtgtgtgtagacattcaaagggtgtttctgaataatataactagtatcttataatcatagaattttatatgctgaacatttttagagattatttgtgtcacttcctaagtgagaaaaggcaggtctggaaaagtgaagtgacttgcccagtgtcactacaaccaatcagtagcagtgctgagactaaaactgaagtcatccttacctttgctacacttgcttttcttctcaaaactgtttttagcatttattcaagtagcatatgttacgttatcataatttaaaagatttggttttcccatttattatttaaatactaattagtaaaacttttatcaccctatagcagatgtcttctttagagaagagaattttggccaggtgcggtggcttacgcctgtaatcccagcattttgggaggccaaggtgggaggatcacctgaggtcaggagttccagaccagcctggccaacatggtgaaaccctgtgtctactaaaaatacaaaaattagccaggggtgggggttcatgcctataatcccagctactcgggaggctgaggaaggagaatcgcttcaacctgggaggcggaggttgcagtgagccgagatcgtgccactgcattccagccagggtgacagagtcagactctgcctcaaaaaaaaaataattttacctttataatattgatatgtataagacacccctccggaggctggacatctgtctcccaacaatataatatatgagaaaatgttttaatgatcaacgttatcccaactgaaatgcgttacatacttagaaagaaattagttccttagtgcttaaagtattcaagcagtgacactgttgagggagatttatgttcctagcagattattaactatatttacttctgaagtctcttacaactctggttctctcagtttattgtctcagggtgttagctttccagtgggtagacttgactttcaatcctacttgtccctcttcatggccttgagcaagttagaccatcatgttaaatctgtttcctcatttaaatgtgataataataataatatacatgtcttgaggctgttaggagattaaatgaggttttggaaaactccaagtcctaggcctgagacataaaaaatatgaaaccagcaccaattttgtccctcattctattttaactccctgcctcactttgttctttttctcctttgatcttgacagtggtttggtaacaatgcctggagaatacattttggggttttaggggaaccttatgaaaaactttgaaggaagtgaagagttgatgatacatcatgctaaagtaggaattatgctagaaactcgagatcaaataccagctctacctcttgcatgctgtgtgactttgaggaaatcacttcacttgagatttagttttacatccaaacaaatggggatgttaacatctaaaactctcaagagattgtgataaggacaaaagtggttactgtacctaaagaaaacagagcttaaaaatatattgaattccttctttgccctttctatcagggttcgtgtatgcatatattcacaagtgctaacatttctagaaataaattgtaggggttctttaccagtgaattaatttgttatgccttaaaatggtctgtaggactttactaatttcttgagcccagtgtcataaaaggagtattttttcccttatacaaattggttagaatacatagattattacctttgagttacatagattattactttttgagtaatgtccaaaaatcactgcatgaggggcttcattatagggaaagcgataaggagttacttttgagagaggaaaagactgcatggtatgtaaaattgtgtttgtcaagtaagtactgtttttggaaagattgggacaacggaaaacaatctatacagtttagatgtggtgcaggggaagaacttggctagaaataccatgaatcctaagattatgttcaccttactctttttattgttccaaactgggatttcctgatctcaaaagatgggaattaacgtctatgagttgttttcagcatttgacaaaaaccatggaaataatatacatcaaataattttatatgagccaaatcaaatgtagaaattctttgagtatactacatctatgtgtatctatgtgtgtatacatacatacatataattcatacatataatattctaaataaaggggaaaattatttgacaataaaatgagcagataaaaatatttttaaatttggacaaacaggttgtttattaataggtttgggaggggtggacaaaaaaacttctagccctatgcctaactgctagagtaaaagagaaaaaaaagtgttttaaaagtaaaaaataattggagcttaagtatatattggagattctgttgcaagtaacttaaaatgaaatcttactagctggattattggccagaatcctacaaaaagggaagaagccagtgctgttctagatatacacacttaagggattttggtatttttgttgtataccttatggtttttctaacagacagatataagtttgtaagagcttgccatttacaaaaatgtatagtagtgggcataatatatgtatttttatttattctttaaagtagaactagaaatatgtgagatcctttgttcatcttgattgttattcactcaagtataatacctttgctgcagaaattgaactctaaatcaatactggagcaatgaggcagccccttcgaagcataaaatatttgataacaatctagagtatgttttgcctgggtataagttttctgactgtacaatggaaataagctgatggacccaataaaacttggtgaaataaaatggaaagcttcctcaggtaaaatattttaaatttttcatcagaaacatgataggacaagacttgatttactgtgattttcagtgataggcacttagtgtttgagttgcatttcatgaggtggttgtctcccagccaaaggagaaattcatgaactctctttgaagccagagttagcacagaatttaatatgcatgtaattatcaaatgtaaaaatcttcataatttattttagtttaaaagttattaatttaaaattaaaccaaatgtacatatatgcatatgcatttggaagaaagatgagagcaacactgaagacaatgatagttgccattaggaagaaacttaattcataggcaagcagaagaccctatatcttccagttcctaactgtgttgcctgtattggtgtacaatgtaatataattttgtttcccccgtttaccttccttttccctccctttgtttctttcatacttgccattcacagttactcttctctttcctctattctttcataccccacctattccttcttctccagcgatctcagggcacatggctccacacttctctctcccaccctgctctgaagccagtgtcctaaagcatcagaggttatagagtagatggcccagacctgtggtttctcactggatggttagtgggagagagtgaatgagaccttaaccacagtcttgaccatgattagcctgatgactttcagtgttgcctcttcctttgctaagtaacaggaagtaattgttttatgaaatatgttggtgtcacagcaataaaagctccatacataaatggaatgatctaaggatagtagaattgaactcttgttagcatttgtttgtaatcccttggtagagcttcctgggtcataattgcttgctcttctgggagcaaaaggaatcagtaaccattgattgttacatgatgctaagtactgcctacaaagcaaatcttaagaatgattagtggcagagttcagggttactactctgatctctttttactataatctttaaagcaagctgaatttcacagtttttcccatcaagcaactcctatgattcttcaaaaggaagagaaaaaataatgtcatgtaatctataaaagcttcagttgacatcaaaaacaaacaaaaatatgtaaaataattacttcagtttttttaaatcttcctacttccacgataacagggagacatctaaattaacccctgaccagtaactttagtcttgcatgaatatgatccttataatcttaattgatctgaactatggaacctgtggtacacagtcaataacctacatagccgctgcctatttagtaaactatacatgtaatcagtgggatcaatacaaggattctcaaaatccttgcaaaattcattcttcaagattgctgagttttctgaatagctgatgatttgtcaccttgaaacttttttatctattttggattgaaatcttttaataacttacaatactagtgactactgtcattttaaatgggatttattgaatataggatcttcacaatgttgaatactgtgatgtctttaggacatagttgggttatgttataactttgttgacccctgttatttcgttaggacatactgagttgtattagggattctagctcttttactaaataacccagacctacgtatgttctgattgtattttgggttattacataatcaaaattagcattacagagctttaagccaccttagagacactttgaaccaaatctcttattttatcacagagagacaagcccaaagatgttaaccttcttgccagagaccacatagagccagaaaatgttgatattttcatctcttctaggctttcagctaccaggtcactttgcaaccagtgtatgttaattgaaacattttttctgcacttctgatgtatagttctggtctcctgcaggtttaaaaggcaaattttaatcaggttaaacatttgtattaaacatttatataaaggataaaatctctctgagtgagattctctccttgaggaaatgcatacattttggtgacatgttttggtgacatattttgcttatatgtcactcttgctctgttctggatcaacagagttcaaggatgagaggtgaatgacaaatgaagaggaagagtaactacttggttctgatggtccttggatttatagcgcagatttaggggagctgagtttaattcctagatgttttatttgttcacttgttcctcctttcataatatgtagaatggcagtaataaatcttttcttttcttttcttttttttttttttttgagacagagtcttgctctgttgcccaggctggagtacagtggcgtagccttggctcaccgcaacctccacctcctgggttaaaccattctcctgcctcattctcccgagtgctggggctacaggcatgcactatcatgcctggctaagtttttgttgttgtttttattagagacagggtttcaccatgttggccaggctggccttgaactcctgatctcaggtgatctgcccaccttggcctcccagtgtgctgggattatagccgtgacccaccgtggccagccagctataaatctttagaccttgatcatgcacctaattggaaattgttttttgaatgtatgagcactactaaattagtcagtgggcttcatgggatctgttttgaaatttattgtgaaaccttatgatttataaagcacaaattacttttattttcatttcttgaggacaccatagcaccaatatttacaaagcacgtatctcataaactctcttgtgatattgaagacacgcctgcagcagaaccccaaacttcctgtcttccctaactccagctgtctccccagtcttcatcccgatggaccatgttttagccaactagaactcgaccctgaatattattttttctcttccatgtttttgctcattctattttttctactataaatgtgctcttcaaacagtctctcctctcccaaattctacttaggcctcaagactcacctctccaaattagatgatgggacccctcttcttgaagacctcctccaaccccccataacctattgcttgtgctttatcacatttagatttgtgtgttcttatttggatgcttgcttattgctcatagtagactgaccatttcctaaggcccagagttatagctaactcatttttatgacctgtatagtaccaaacagtgtacaggttgagcatcccaaatatgaaaatttgaaatctgaaatgctccaaaaatccaaaactttttgagcatcaccatgatgttcaatggaaatgctcgttggaacattttagattttggattttcagtttggagatgctcagtggtaactataatgcaaacattccaaaatccaaaacacttctggccctaagccttttggataagggatactcaacctatattttatatgaagtaggtatctcattcgtatatttatggaataaaagttacactgagggtaacttgcttatgggagtggaagaggaagaaaataatctgaaaccgggtcttaaatcactgacattttaattttgaagaattcaatatagagtttagtcattacaaactttgttgagacatgcttttggacattttaacatataatttgcaaagtcggacgtgatttaaaaaattcacatcatggagtttaagagacttcaggcagcaaagaattttatttcatgatagtatggtgattaagagcacacactttggaaccagattgtctggctttaagtcccagccctgtctccggctgtgtgacagcatgcacactatgaactatctgtgccccgattttctcatctgtgaaatggtggcaataactatactttcctcaggggctttttgtgaggatcaaatgagttggtgttcataaagtgtttggaatagtctctggctcatagcgctatataagcatgagctgtcgttactaggcagttttaacaattaaagtgcatttccttagatttcaagtttgatagcttgtgattacaataacaggcttcaggaaagggccaggaattccaagggacctattgacacagctatggatgtgctactatttattttggtttggtttgttcatgtggtttttcctctgtgtgatttatgtgttaccatcatacctgcattgttctcaggatttaggagaacagaaaaggataatcatcaatctacctgtcagtcagaaatagagcgacatggatggtttgaataaaaatgctgccctctctggcaaaatgccatctgttgacattgacatggacaatcatatatgtgtatatctgaatttattgctgtaacttcttattctgtcataaaatggtggacaaattcacaaggagaaaagtaacttatcttagttgttgaagaactgttgcaaaggctttgaattctgcaatgctatcattttaccaagacagaaatctactcattatccagatgcactcaataaattaatgcgatgatgggtcctgtcattgataagataacagtgatttggaagtatctcagtgttattaaacaagatcacagaagagccattaacattttaaaaacagagagatcttgtagataacctaatcaaaatattttactttactcatggggaaactaagatccagaattgtgaaatgactgggtcttaaatacatgcagctagtaagaaacacgggctggtctaaaaaacaggaatgccacttcatttagggctttttttttttttcaatatcccatgctgcttcttataaattagataattctttaatggtggaagactttattttttctgttgttctatattctttattgagtgcctgctcaatagagaagagtttacctctaaaaggagaacaaacaaaagaataataaaccagaaatcatatactatcttagcaggcagtacatcatatggggaaaataagtgtgaggagatcagagtactggtggaggagcatagttattttaaatagattaaaaggtacaaacatacagtctgatagaagaaataacacctagtgtttgatagattagtagggtgaccatcgtttctaagagtctattgcatgtttcaaaacagttataagagaataatttgaatgtcctagcataaagaaaaaacaaatatttaagatgatgcatatcccagttatactgatttgatctttataaattatatggatgtattaaattatcacatgtacccccaaaagtgtgtacatctcttatgtatcaataagaaataaaatttcaaaaatacccttaagaaatacataaacagaatggtcaggaaaggcttctttgaaaaagtaacagctgatgaaaggcttgaatgaattaatggagttaaccatatggccatatggaagaatgttccagactctgggaaaaggccttactgcccaggcagaaggccagtgtagtcaacttaagccaatggcttaagtgtagcatgggaggcaggaggtattaaatgagatcagagaggtgatgaaggcctgatcagggaagcatgccattcattgtaagaatgatggcttttccaccgaaagagatgaggaattattgcagagttttgagtgaccatgggacttgatgccttaggttttaatgggatcactgcctgctgtgttgagaatagcttgtggagaaggatcccaagatcccggtggaaatagtcggaccactgaggagattgttgctgtaatccagatgtgtttgtaggagttgtaggagggaatgtaaagacattattggattattagattctgaatatattttgaagatagatttagaatgatgtaatgatgaattggatatgggatttgagtgagaggagtcaaggctgatttcagtctaagtagttgaaaggatacggttatcaccaactgagatggagatgatctaaagatcattttgctcagtctcccaatgcataggtgccaaataaatcaaggttcttatcaaaattagaactgtggacattaccttctcataaaaataaagcgagatatgcctgagagcctcctgtaaatcaatacggctttatgtgtgactagagatccttataaatacaaaagaaaagttgcagtgaaattgaggatgtctgcctagactactcggtaacactatccagaacccacaacacgtgatgatggaatgaagtcccagggggatgtagaataggcttccaacaaaccactttattcctattttatggtttctttttaattcatcttgttcagcattcaaacctggttcaagttgttcagtttatctaaagcatattgccccatccctctcagctcactttcagtcatcttttaaactttatttcagaagtctactcatcttagaaatgtgcactttatccctaaggtgagctaagtactttcctctctttcctctaggctttgacagtatccagtattttccacccgtttcccatgtactctgctgacatgcatgtattcctcaaggtcaagcatttcttttatccatgtacagatgcttcacatagcaccatgtatactataagctctaagactttgaagtacttgcatgtcccaggtagaggtttttctcctttctctattaagctgtcaattttctatatttatgatgaaaatacacagcaaaagtagtgtaaatgcttattttacttctcaaattactcgtcaagttgccaaggtgccaactattttttgttccacatattatatcttctctacttcactttctggaaagtaaaaagcagcaaaaaggaggttatcaagagaggagaagcaggaaaagttctagacagtctacttcatttttctcatattctagtactctagacagggtgaaggctcctgttgcagaagtgatggtcacatattcctgcaaataccaagtactcagttcagcccgtgcctgcagtctctttacatccctgtcctcctctgcttctcaaattttacctactatgcaaagtcttgatcaggttccactcttctttagagacatttcctatactctgtggtcatcattaaactttcctccttagtctctattccagcagctcgaatcatctttaatactcatgtgtgtatttaaacatccatcctaccacataggtgtttgattcagtcatgtgtgttttatattatgaattaggttttaagtctcatctttggttttatttacctcctcatacctagaaaaacagattaagcacttgttctctacaaggccctgggttcagagtagtagaattgagagagacagaaagagctagtttctgtcttccaggagcttggtttcatcaaagacataaaagccttgccattaactggagtataaggtagtatatgagatgtatgaagaaaaaatcctttagtttgaggtgaaaaaaaaaaaccaaaaaggaataaggctaagaaggaagagaatcagaggcatcttcatattgcatggatagttgaggtgggccttgagagtaacatatgattctgatgggtgtggttatttcaggtgggagtaaaggcccaagggaaacagacatgttaagtgcatggtgagtcggccagttgagtcagtatgaaggaatttgctgatagcgaacatttattaagcacgtattgtgtgttcagtgctttgcatgtattgtctaatcctcacacacacaaaaaaaacattgttcctttttggaaataaactgatggtgtagaaatgatgatgatgatgatgatgatgatgaagatggtgatgatagtgacaatctgaatggtgcagaaggaaatgggatgccatgcatgagtctaaggaagactatgaggaaggaataccactgaactaattgaatgcggagaaggaaggaaacgattccatgcacattagtaatttagcggttgttagattaatgaatctctgagtgacaacctcatacatttattcaacatgtatttattgggttctcctaagtctttatgtatttattaatgtgcaaaatcagtagatttatgacaggaagtgacttgtgctccaatttccagaaaacattcattacttcttcctgatgaagctgctcagttaaataatattaattgttcttcccctgatgttatacaaaaattaaaattgatagaatacagaacttaaaagacatttttactttactttttgacattattcattgtttgttgctgatgaatgaaacctcttttcgagtgtgtgttccctttaataggcactggtaatttatgtactaagatttatttctgtatggaaattacaagtgaaatttcatattgaatttatatttagcctgttctagtacatagtctctgcatagtatatccatggcatcctacttaatattacagattcttttatattagtgctgctacatgtgtattctcaagcttttaattgtacaattattacaaaaagaggtaaaaatatttcccctacaaaattgttgctgttaattttttcctgtttattcatggagtattcaaagaagagctgtgtgttcattacattccacaagttagtccattcagtttgttcaaaatatgaattctgatgtccagcagttaatataagattttggcaggctattaataatggcatactcaatttgtagctctttcatccatgtaattttggtgatgtatgcactatgttccagggaaaggaatagttcaagattaaagaggcaatcagtgtattggtgcttattttcagtgtgtcaaagctgctaaatgaaagggtgcaatttctacttgtacaatttccacttgtgctgctcaaaaacaagccattgatattagacgtgtatcaagcatacgtggttgcagatgtaaataattaacattaaaaacattttcttctttagttgtgtatttagaacagtgatacttagttaatatcaacagcttatttttagaatctgaattttaaaagtagtgaaaatacttctagtgattaaaacaatgtatgaaaagaaaaaaattagtaggctattttaatataattagtgagtatgctattttaacataattcaaagatgcattcctattttaattaaagctcattcagtatgcaagaattccagtttccattacttcttgctgctgctgtctgatcttgtgtttcttgagggacacttcttttatgagcaattcttttgcatttgcacccagattccttcacgtccaaagcagtagtttaaaagagaaggctacatttttccattttggcctggaacttagatttttgttctgcttacttcttctttaagtatagtgaatatataaacttgtaggcactcctttgcagacagacttcagaatcacatgttcagatgaatgtgggaatgtaggcagaaatcagaaacctgattgtgcttcaccgcttcagaccctgccctatgaggccctccttgtagaagaagaaatggaactgaaccaataactgaagtgaaaaacccttctggaaactgtatatatgaaaagattccatttagatccattgaattttgcctttcattttcaaacttgcaaatagaagcagcattttaatatttttcaagagggggaaaaaaaagagcgtggttccctggccctattgtatcacttccattttgtctggaactgatttcatgcaggagatgcactggaatcagcatgcaaattctatgtggctgttgttcagtctgtttttgattcatcgtggtaaaatatgcataccatgaaatttgctgtcttagccattgttaggcgtacagtttggtagtgtcagatgtgttcacattgttgtgagaaagagctccagactttgtcatcttgcaaacatgaaactctgtacccattgaacaacaactcctggttttccccaccctccagtccctggcaaccaccattctactttgtgtttctgtgaaacatcatataagtggaatcatgcgttatttgtctcatgtgactggcttatttcacttagcacagtgccctcaaagttcacgtgtattgcaacatgcatcagaatgtccttcatttttaagactgaataatattccattatatatacagtcatacgtcacttaatgacaaggatatgttctaagaaatacgtcattggaccatttcatcgctgtacgaacatcatagagtgacttaacacaagccttgatggtatagccaactacacacctaggctaatcgatagaatcttttgctcctaggctacaaactgtgcaagtatgttactgtactaagtagtataggcaattgtaacacaatcgtaagtatttatatatgtaaacatatctaaacagagaaaaggtacagtaaaaatacagtattataatcttatgggaccactgtcgtagatgcagtttcctgttgaccaaaatgtccttatatggcacgtgatggtatatgccatattttgtttatctcttcttgcatcagtgaacacttgggttacttccacctcttaaccggttaataatactgatatgaacatgggtataacattctaattatgttttgttcatctgtggtgggtgtgaaagttaaaccaatggaacctttttttagtgaatttagtcaaatttctgaaaaccaagaattcctatggaaacatactgataaacatacttttcttattatatattaaaaatgcttgtagggaaaacccagcttctaatagtactctgggtttgtgaagatgcagtaagtgcttgctagagagatgtttttaatctagagagctagagcagagacttagagttcacttgtttcttctctttttttcaatcatttataagatctctcatcttaactcattaaaactggctgattgactttgattactgacacacccaaactatttcaaaccagttagttcaaaaatgcagttgcctctttgaattatttataaaaaggatctcattacatttttccatagataacgatgatggcaaaggggaagaagggatcattatgccactcctttaaaatgcgggcttctggcctggcacggtgactcacacctgtaatctcagcactttgggaggccgaggcaagcggatcacctgagggcaggagttggagaccagcctggccaaaatggtggaaccccatctctgctaaagatacaaaaattagccaggtgtaatggtgggtgcctgtagtcccagctacttgagaggctgaggcaggagaatcacttgaacctgggaggtggaggttgtagtgagccgagatctcatgactgcactccagccagggcgacagagtgagactccatctcaaaaaaaaaaaaaagtgacatgctggttaaaggtccctgtccatatcccccttttgcaactatttaatccccagcaaagtcctagccaggatttcctggtaagagtttttctgctctgcgttgtcaacagactattttctccaactgagctcatggaagtaacctagtttctatcactagtgggtctcagtcagaaaaatatgagtgtaggttattgaagtgtcagggttgtggtggccctcttggctgtgtgcttactggggatgaagtacatggtggaatgaaggctcttactagggagacttctgagttactagtttcaccacacagctgtctcacccagtatcttggaactgtttcttgcttcatgtgtgtgaaaaatatagtaaatttcctggtcatattttagcataattaattataccaactattaatttaatattttgtttgatttttagtttccagggtaaaacattaattttctctttaatttccattctataagattcctattgttttcagcaaataggagtttccttctctgtaagcattgctgactcaagactatataatgttagaaatagaaaaaagataagaacatgttagtatcaatagcctttattattataatcggtatgggcctaacttctgctagcaacattaaaaatcttttcttttactctatcatttagtaacggattttcttttggttgtgtcgaatagaattgtttccttgatgttccttgatagagagtgttctctttaatataggaatacagtaaagaaagcatccacagtttgtgaggcagagtttagtgctgatgtgtacagaaactcaagtgatatttagacaactgagtccttactgggaatcacttaagccttaaaacatctctgccattatgctgcttattttacattgttctggatagatgctcattatccagttctcattcatgatgagcatgggattgataagggagctgacatgaaaattatggagaaaaaatgcaaatagcaaaagatagaataaagcatgtatacctcatgatcattttccccattgatattgatttggactcactcttgatgtatcaggtgtgttcaatctttggcaaacatttagggttttcgtttttgctgaggtccacttgaaccctggagcccaaaagaagtaaccaaaaatttctatagcttagtaaattccatgttctagaacttttaatgtggacctcagaaaaaggaaataaccaagagtgccgaaagctacatgtactttgaattgttcagcatgtataaaacccaatggctaaccgtgtctagaaagaaggagataagtaaagtaagattggagcctggcgtttggagttcagcaacttttctctgttgtgcgctgacatttaagttaatagagtgatttctggtggatttctttgaaacaagacagttcatctgagatttggttaaaaaatatttcattactttgaggaagtgattagggttggtcttatttagttggggctttcaaaattgatagttttgcctgatggtatatgctaaaacattgaattgtgagtttcctagccagactggaccctaagcccatcatttggaaatagtctttcttatttttgttattcttgtatttattaaagaacattggactagtgaaaattacaaaagaaaggaaaatgacacaatacactacattctgttgtatcccatttctatctcagggaattatgtgtgtttaccaaactgatgtctagatgaacattcaatttcgtatcttgccatttaaaatttaacatcatgtgcatttttatgtcattaaatgtccaaacacctggaatttttacgtttgatttgttattgctaaaaagtacttctcttgatttttaggggttttcacttttaattaaaacatattcttgaaactccttctcttctccttggctaaacctgttatgctacaggacttcaggataacttgagctgctttggctctttgattaagtgcagatgtatttagggtttgaggtgaaagggtttttaggacaaatcgcattccagtttgagggaaaaagagagagaggaagttttggaagttacaaattcattaaatttttgcttccacatggaatccacaacttttccttttccctggctgcctttctcttcttcattgagttttccaggcctctcttccttctgcacaggctccaaagagaatggctgactataagggttattagtgatattttgggagttattccgttcttatccactctcccaccaacacacacactctcacacctcctcccatcaaagcttgggatctctgggaacagggaaacatatcaagatattagaagacgtcaatgttatatatgcagaaatggtgaaaaatcaatgaatttagtaagttaaatttgtttgggtagcattttaaaaatatttaagtactttgacatatgttaccccctaatacacagagggtgctcagacagcatttgctacaggagtgaaccctggccaaagctgttttaaccaagggacagtggaggcccagagaggttcgttggtttgcttaaaatcacacatccatgggtaagcaaggtgatggataatcagctcaattgagtcagtttacattgtatacacataacaaagcatcatgttgtgccctgtaaatgtatagaattatgatttgtcagttaaaaataatattaataaagtaaataaaatcacacatctcacattgagaggagggcagcctagacccagatttctgttagccccaggaattgaggcatatatgggagactagcagacaacacacataggaaacttttgccacttaattattattctttttctcaagaccactatattcatttgggtttgttcttatgcttttttttttttttagcaaattaaaaaaaaattatccttgaatgattctaggttagctttttgactaatggatgttggaaggagctcagtgacaaaggccagggattattttgcttttcctcacctcttcctttgttcctcctcatcatattacaaccttctgcttcaggattccttctgctttttagcaggattgacatgctgggccttacccggaaaggcaaaggctgatttgattagggaggtctttgttccaggtatctcacatcagagagccttcataacaaatgagaggaatggattagaagtttcctggggataattttttgtctaccctttaagggaaatcttgccttcattaattacatctcaaatggaatatgtggaatatagacattttcataatcaacaaggtgattttcattttaaaatgcttaaaaaatgttaagcagcatgtatgcacgcacacacatgcaaccaatttcttccacctttttcttgttttaattcttaaaatatgaatttttaaatataaggaaaatcctaaaagcagaaactaataaatactaataaaatgttaattacattgattaaatcattagtattttaagatgggcccctgaaatgtctccataaataagcttaatgtgctttcatttaaacaacaattcagttagtaaattcaataaaaagcaaactaatgtgacataaacatatttatgtgattagaaaatcattatatccactttaagtgaaaagaaaaagtcttcatttttgtgttacttttccaaacctccttttggcactgaattgtactttatgggggtgtcttgtcatttttttctaaattaactacacctctgcttgcctggaaactagagccattctgacttctattccgatatgtgtttttcatctcctactttttttttttttgagacagtcttgctctgtcgcccaggctggagtgcagtggcacaatctcggctcactgcaacctccacctcccgggttccagcgattctcctgcctcagcctcccaagtagctgggactacaggcacgtgccaccacgccccactaatttttgtattttttaatagagatggggtttcaccatattggccaggctggtctcgaactcctgaccttgtgatccaccctccttggcctcccaaagtgctgggattacaggtgtgagccaccatgcctggccttcatcttctactttttttatttttaaatattttttattcactattgctgacatcactctcctacctactcggtattctttcattatgagaatctcccacatgaaaaatagtggcacctctggaactcccaaattctagtttagacagattaatccacatttatgttactatttataacagcacaactctgtaaataaatccaaatgtccatgatttattggttacatgttatgatattctgtagaatggatattattgtagccaaaaaattaatttacataggtacacagatgatgacatggtaagctttctttaattagaaaatgtttctttcatttaatatctttcatcttaagatcaaaaacaatcttgcaatattgaccttacagcactgttcttctgttatcctcattaaaataatatcaataacaatatagtaataatggccattgttgttgttatgttctctgaggcatttagctcagagaatgttgagaaaaaaacctgacaaagtacttaaatattcttgatgccatctctctcactcttcataggttgtggatataaagaactctgtttttttcattttttataagccacaaacaatgaagtaatcatttctttgttaaaacaagaatgtgcagattattctcactgaaaagttaaaattgagttgtatttaagaataagcatctagtcttgaccatagtgtttatgcctataattaaaacaaaccaaagccaaaaacatatctttcaaatggtttggtgtcacaccacaaagcgagttattttaaagccattggaggattctagcaactgagcaaataccgctgatctagtcaatatcaattgataatgtattatatgaaggaaagtaaaatctctttcaaaactttatacatgtttcaattcagttaattatgtaataatagaaatggcactatcatataagagggtagatgatataatttatagatcattttatcacttaaagcacctctaagtgtagaaatagaatcatagaacctcatattcaaaagcctttctgtttatctatagtggaatcgattaaatcatatttgtgtaataaatgacagtcataacaaatacagtaattaaaatacagttgttttacaaatcactgtcttccactctttccacttccagcattttcttttgatgggttagaagattaaatagcaagttgtaattttaagttatggctctttgacagtggaaaatggattaaaaaaacacacaacaacctactaagtcttgtagtttcttccatgtggtcttttcttatctagagatagtaagtcaggcatctacaggaaaagaatccactctagtgaattcgtgcctgcctttgaactgtgaaaatcctttgcattgccccacatttctaaagacccatgaattgtgcggtcagctagaaatatcctgtttcaaaattgagattacgtgacactgccctagaatgacacttgagctgaatgctcttgtccactgctgtagggtacacatgaaaccttttacttagaaatttaaggttcttcatgtggctggaaaaatgccacaacatgacttttatcaggctaaaatttactgtgtcatgacgaaaattgaataaagtaatcttgactcattttaatttatttcacctatgtctgactccagctttatcctaatatacaggacaaaagttatttccataggagcatctattatttgcctctatttctaaccctgtacaggtatgttagaaacactgaacataattttatatatgtctttgtctcatcaatacagtgcagttttattttttaactgaagaattcgtgttttgacatataaggggttaccagagctatccaattttattttatgaaacaaaattgtaattattcaaagtccaagacatgaacagaaaataaaaagtaatgtttaattcatgtaagaaagcataactgaagctcattagtcaaactaaaaagctcatgaaatttctcacctgaatctttcctcaccctgggcagagacttcctttcaatttgtgctcaattttaggcaacatttaaggatctgaataggcaaagagtgagagcaatgattgtaaatgtgttgttttaaaaggtttctccactaaattcgtatatgacaactgaaaaaaaccttgggacaatgtcattcagaccacaggaaagtgcttgaatatgttctctgatgctctttttagagcagctgatataaaaagcaaagaattttatgtccaaaagacttaggcaaaatatccgaacggaatgctgaatgcatggcttttcaatttatcacagtttatagacactttacatctatagtagtaatttaatttaatttcttagaattatggaaagaacaaatggtatcatttagtataaatggttctctgctcccctcacctccggagttttaaagatggtaaaactaggactcagagatgtgaagtggctcacccttgatcacacaaggagacagtgatatattttggttgagcccaagtctccttctgaatctagagctatagctgttaaactaaggtacttctcaatcatatccatggagcaaggatgtgagagtagttggcttttgtattatatgggataccactgcaaaaaagtaagcatgacagtttcaccttaggggtgaatttcatgctttgcaccagttcaatacaatgatgagagaatggctctcatggtactgaattggacactgtacaaattcatggtgttattcatattactggccataaaaagagcaagatcacatttatatatgttctggtgaaaattactctccagtgtttctgctgtcacctacccaaaccaagctgtatatttttttcttgagaattttgcatccatactgtttcttgtttggtttgcactgacgaagaacattcttcctccacagcacagatctagttatttgcaaaagatatttttaaaattataagcaaatgttgatttagactccttacacattaattaagagaagcacttttgtggatgttctttggcttagttcaagactttgtcaatctgacttttcattaagactttatttattattttccccaaaaagtacttgttgctcagatttgaataagagtagtttacttgtctacagataaaaacaccttggctgtattcaaagagtaaaatatttaattcaaattttaggctatctgaattttatcctttctgcttagaaatgataaacaaatatttattcttttattgagcaacagctatattccagaactgttttaaatgcttgagattggggaatagagataagtgatactagcttggtatgcacgtatatgggtgaccagggggattgttaggaagaggaagaaagagaactattacaaacacgcatttataaggcagcttttaatcatcaataaaatatggtaaaatatgttagtttattaattatttgattaaacacatacttttttgtatgtgaaatactcaagttaatttgtcttgtttatttggccttgcttgaatttactaagtaaacagaaatttctagccattctcaattcaaatgaccacaaattgagagaatcaggaacacttagatacttagccaacacttttcactaacttatttaggatatatgcctgagatcatgacaataataataatcatggtaaaagtagcaattattgttattttaatagtcataacagatgagtgttgccatggagtcagtatcacaacacagccaagtccatctgcctcattttgatgttttagtggccacctaactgataccgtctggtgacactcaggtcagtgactcccgctttttctaagggatggcctcagtggtttggggaaggtgccaaggaaagctaactggggacttgctcctgataagtcagtgatcatggaccacaacaggtggccatgaccccaggggggctttgcacacttggaaaggtggagttgtgcaacattttgctgtctggctgccaccttcagtggcagatctattgccacttgggttgtctttctcataattatgttccgtatttctcaatatgacagaagtttgttaacctagttttagttctaactctgccatttactgctcatgtgacccttggcaatctgtttaaattttagcattttcatgtttttcccacctataaaattaatatacttttctcaggttagctgtgaaggttaaatgagatgatatatgtgaataggattttgtaaactttaacaacggctgacacttactcaatattggctatggttttatcagataggcatggattgagttatgcagcttctctgttctcaccttgtccttggtgcctggggaatgtctagtattcgtagtcagtgcagtcatcccagttcctgcaacgtggtactgataggaggaacaacaatcaacatttaagttttgtctaacttgcctaagtttcttccatttacagtaagtgatgagaaatggggtataagtgtgagatttatgtcactattcaagtggggatggttaagtcaattaatattaagtaatattatttaaattaattattgtctccttgactctaatgtaggaatacattatataaaaagtaaagattttgtcatctcatcatccacagtgttttgcatgtgctaggttcttagaaaatacttttttaatgattggcttttgtgtttacctcaagagtatagagagagactgaaaaatatgtaaaattatgataatcctgaagtttaaggttcatgaatcaaattttcctcttcaaacaggtgaataattttgaaatttattagtaaatatttaagttgactctttcccaaatactgcctaacttcttttcttctataattaagtcagataattttaggaaattggacaatttagtcatctttctatagcatgtacactacagatgactattaaattatgattccttcagaatctttattttacaagaatataattaagcttggctcagtggctcatgcctgtaatcccagcactttgggaagctgagcggggtggatcacttgagctcaggagtttgagaccagcctgagcaacatggggagatcctgtctctacaaaatatacaaaaaattagccaggcatggtggcacattcctgtagtcccagctacttgggaggctgagataggagaatcacttgaacctgggagacgaggttgcactgagctgagatcatgccactgcactccagcctgggtgacagagccagaccctgtctcaaaaaaaaagaaaaaaattattcaatcatttatattttctggaattttttctaaaatttctcccagatactttaaaaatactcctgcaaacaatttccacttgcctagcaggccattcagaccacagaactaaaagcaaaatttatcagcctttccttccaatttgccatacccccacaaatcgcacttataaagtcaagagtaagcacatttctaacaaggaccaaaacttttttctcaccaatgacactttcctatatcaagtgtacctaatcaggcctatcattaagaaacacaacctttgctgtcctctgctatatcacatcatcttttcaattcagattctatttacaaaaatcctctaaactcattggtttttctacaatggtttttgatcacattatattactgacaaatgctatttttatctcctatatgggtgaatcatgcatattaactctttcctgggatgatggacataaaaaatctcctttagagatttaattacatttaaattattttcaagtcaagtagagtataaattcacattttacaacagcccatcatagaagtctcactggatttgttttctttccgctaatgtcccaggtcacctatctgaaataagctacttaaaaaggacagggtggggagatggcagagaactgtgctgcaggtttgggaagcaaagaaacaaataataatgtaaatgtcatctgtgatctaagattgctatcagtatcagatattttggcttttggtcctctagcctacctaacatagacttttttttttctattcaaaaaaatattacacttgtaggaaatgactagtgttgactttctcactctgagtccaattacgggttctttaaactgctcatcgctagtattatatgatggtcagctttaatgagtgctcagaagcactctcattatatacaaggcttttgaaataagctcctgtctcgatcaattgcttcaccttcttcagagcaattagcataagaataaaggaggttaaattggacttccgggctttggtgaaattaattaataccacttcaccggtaaggacaataagtagataaccattttcattactttatgtgaaagacagattatcacatgcacagcacccagactagtacaaaagtaacccatgctgaatgtgctatcttttaagtccatgtattatgaaagatttttttcctgtaattttaatagctcaaaaaaagttttaatttattggtgacgagctgggtaaaggttggccattacatactggcaactgcttgggtaggatgtaagttgaaaaatataagaaaaagaatggcattaaaaaaaaagtagcctgactgggtgctgtgcacttgtagttccagctactcactaggaggctgaggtgggaggatcgcttgagtccaggagttcgagtccagcctggaaaatatagcaagacatcaccccaaaataaaataaaaggaaaaaggaaatatctgtactcagatataataagctatctattctagacaaatgactgattagtattttcatgctcattcttgtacataaaaggtaaagtgtcctataaccatcatattttttggaattccagagcataatgccagcgatttaactgtatggatagtagttaaatccttaacaatatatagtacatgttcattttctaaatagtagttttaatgttataaatgaaatgcagcttttgcaaattgaaaatcatgataatagaagtctgtaccctccctttatggcccattaactatctttgcatcataatatagttatctttctcaaaaaaattaagcatttagctctctcaaagatgctgtcacttttttaccctaatacgtaacaaagttgaatggactcctttcctccactgttgtataaatttaatctacattacaagataccacactactattcaagatctatttgagtgtttaggcatttcttaccaaaataatctgatacctactttttaaagaagtcaactggtcatgtcagtgaaaatggcttaattttggcatatagttagtaaaggctaaattgcaagtccaatctatttttctgatcttatgtgttcacctgaaagcaaaataatgagttcagatattcttgcatggaaacatactcattgtgatcagaatgaaggaagttattgctaatgcacttacaaatatgtttatccctgcgagctaatgtgtctcaattcctgaaagtcattattaccttgctcctttctagtattttaaaagatgaaaaagtgataaatttcaaaataataaaacatcattatttttgacattgaggatgtcattttgtaaattaacctatgacatttttactttttggttaatccttcagatttactcttcattgcttttaactatgaattaaagtaatgagttgaattaggtaaatgtctaacataattaccatgtcctcagtaaaagatgattgttaatgtgtctgatgatggctggttgactagaaattatcttcagttccacattttcaaaatgaatgcaccgtgggtggaatggaaaataataatttaaggcacattaaccattaatatagatctagggtgaccaattgcccctgtttgcccaggacagggaactttgggttttaaaactgataccaaggggtacctgggatgctgaatgttcagtgctaaaaccaggaaagtccaggcaagtgctgagtggatcaggctacatagattactgcacaattaattatagtaaattgattctgtatgcaacttaaataaacccagtttattgaggcatgatccagtttgcccgtgtgagaacctgatttctgtgaacatggagatttagccataggtggctgaaggagagacataatatagatgatgatgttaatgatagcaatggtaaccatttattgatgacaggactggacttttttaagacttagccaaagataacattctctgaaatctttcttgatatccttaccctacccagaattttctgattcttcctttttactcccaatgtaacctgtgccgaagtttattataatgcccttaaacttccttatttgtttatttgtcttcctctgctagaatataagcttctttaggaggatagaggcattatgttatttatctttgtaccccaagcatccagtatatttagtgaatgaatgaatgacctaggtatttttttttactcttcaaagtaatacaataaaatacatgataccatcctgttttactgatgagaaacaagtatctaagatgttctgtaacaagcataagaatacgttaataaattatgaagccaaagatggaaaatcagatctgtctgattgcaaagccagttctctttccattactctgtattaaataatgctggccaaacatagtgacttggaggaccctctcctttcagtaagagagtaggaatcagatatacaaatgaagactatgtcagtcttattatggatactgatgaaagttttctggtaatctgcaaaatagattttatagataattgctgtggaaaagaagtgactaaatgtaaaatataatctctgctggtatgtttagaccaggaaatcaaaatgcatgacctagtcagacaaagcaaaaggttctttacgtgttcttcttgtatcatcagtgagcctttttcatttaagtacaatgaagtgtctctgccttaagaaattcttcagaggcagaaattcattattctttattaactcactgtgcccttctccttcttctgcaccttttcctgtgtattgtctcccattttaaaatgtattaactgagaactaaagatagcaaagtgttgtcaatattataaagtatagtaagacagcatagaactacatggagaatatattgataacagcatcttttacacagtgatgaattaataattaaaccaaacaaaaccaaacaacaaaacagttttacagctacttgggaaatatctgtaaacaaagtttcataataattaactcttggaatatcgtcacttgtacaaatgctgcaattctagcaagtttgggacacttacaggaaactgtctgcaaataaacatgtataatgattttagtgtatatgacatgaaacagacggcgacccatttattaaggtccattacacagatataggagggactttaaaggcatcacaaaatacttgccaggaagtaaatgttgactatttccaaatctcagtgcaaaatgagatagataacgttaacatgcacatggagtaatacattctttaagtacctattcagtgaggacctgctatgtgcaaggcacgtattccagatatatattaatgaaaattgtgatcagttaaaaataaatgttactattttcattgatctcattttctattttcaataaatcaattacaggtaaaatgtgttatgagtgacaaaatgactggaaagtttttgccttaatcaaaatttgtgtaattattttttgtaggtaatcaggtgatttagaagcttaggaaattatgatgctatttttatagttattatgctattattatgatgaatcacccattcatgtgcattaagcagcattgattaatatttagattttcagcgttttaagtgtctgtaccttatttacatattattaaaaagtcaccttggttgtaatcatctgtcttcccatgatcacaatacaggtttgtggttttcaatatgtcatgactaagaagagattttatggtgcttaaatatgtagtaaattcattaaaccttagtcatgagtaaaatgatccctgtaataccactagttgcataatacctgcttctgatgcctgcttttaatttttctaaatacattggctggtttctagaagataaatgtaatattctacagagctatagactgttttgccacttggaatatctcgaacagttgtcatgggcaaggccgcaggtgctatatcccaagtgtatactgcttttatttttacatgtacaaaatattagaataataaatatatggtaaggcttctagaaatgaaaactgttgtcaatctgtaatttatagaaaatttatgtaagaaaacttatgttgtcttttaagcaattctcctgcataataacttagtttagagtaagaaatatgcatcttatctaaactgatttatagaccacatgctatttttacaaatatttaagaaaattcctagataaactttggaaccaaaaacaatgtagcctaataacaatgtcaactatacttacagtataattttatatataaccttttatctttataataataaatactatcacagccatttagagaaggcaattttagtttacctctattgcttaaaggctttagctattatttatgcacaacaagaattctgactttttaaaattagttttaaaattttggatcagctttataaagaaacacattgttgttaagtgcagacaaatgagaaccttgccatttctgcatttatgaccagaagccaacagagtcaattttcatgtttatttattctttgctttagaatgttatgtcagttgacagtattcagggcttgtgttgatgtaaattgccataaagcaaggaaacacgggctatagtactgtcagggaggctcagcactgcagaacaacacaatttaagaaaagcatttgcagaaagattcagtgtcagtcttcggaaattgactgtagatgcaaattggcatcaactacttcacaatctccctctaacaaaagagatggaaagggtggaatcaccaaacagagtgcacttttcggcatagtagctttcatgaagacaaaaataggatcccatttgttcattcacaatggatattcagactccacattctgccacccccatgttttattggagcctgcaattctgccaggagaagggttgcctcatgctaattcatcctaatgtttctcctccttcctacataggggaagtcttccaacccttcctactttttaagattagaagaaaagattcctcttaagccaaccatctctttggttacctttctgtaatgcctttatactgatgaaatgctgttatgttttacctaagttcggatattgtcattgtctcctgctgactcaacatgcattgtagccaggatcctggtctaaattcctgttatacaaaaccctgagctcttctaatttgcttcttgaaaaaaaaaaaaaaaaagaaaatctggccaggcacagtgggtcatgcctgtgatgccagcactctgggaggctgagatgggtggatcacttgaggccaggagttcaaaaccagcctggccaacatggtgaaaccccaccgctactataaatacaaaaaaactagccaggtatattggtgcacgtctgtgatcccagctactccgggaggcggaggttgcagtgagcagagatcatgacactgcactccagcctgaacaatacagcgagactttatctcaaagaaaaaaatagtcagctctagaattcttagggcatagaggcaatgttaacaaatcagaaggtacattaccattttaaaaaattttgtcaggcttatactcagatctctttaaacattacctacatttaaagaattattgtatgtaagagataaacacacaggaaaaaatatttgatttttgcttttgacctgtgtcattaaaataagatgattctccttatttctcaagaggcattccaattttaaatagagtggtagggaaaaaagtgattttagcagggatttacctgttcgtttgtactggtaagttatttttgtgttgataaattatttacactttaatggaattgaggtgtcatcatcttccatttatattattttgccttcctttttcacaaattttttactattaagaaagctacaagaggtgttatttgaggaaacagtcctataatatcattctttttttaaaattgacagtttcctcaaatatttatgggggaacctttctacttctcaaatttgaacagacaactttagtcaatgcttagcattgattttttgacaactcatgtccatttcaacattttattgtgagatagctaggaaattagttgtaagagcagaaaggtaattaggtaggtggtataaaatttttgacagttttgacactactgatattttcaggaaaaaaaacgcatacatatcctagtttagagtaagtctagctgaaaatttaaatatatttttaactgaacataatttttgagtttgagataattttagatatacatatagttgtaggaaataatacagagagaacccctgtaccctttgtccattttccccaatggtaacattctgcaaaaccatggaacagtatcacaagcaagatattgaccttgattcagtcaacatacggaatattttcatcagcgcaggaatgtgactattaaaaaaaatttaaatttttgaggattattctacctccaaattctttagtactaaatattcttacatctagacaaactaaaataggatttataggaaaaatgatttgactagagagtcaatatgcctgaattcatatctcagctctgccaccatcactggtttaattacatttggggagtcacagcgtggtggggcctcaatttattcttttggagggacttagtctaaatcagtgattgtcaactagaatgaaagtgagggaactcctcccttggagacttgtcagaatcttggaggagacgttttgcagacaaagcccaactcttttccctccacactcctacctccaccaccatcacaagcaaattctgatgtttgttcctagacttctaagattttgactccctcatcttccattgaggattgcttatggaaacaacgtaatagattcctagcaaatcttcatgtatagtgtgtcagcaactagtctcaagtgtctaacgttcttttcaactttaaaataataataagaaaaaatatctaccaagaacactaaaaatctttgtgcttcacaccatctagctgatgacgcataagagtagaggaaaatgtggtcaatacatgagccaaattcagagtggtgcatgcagaaggcttcctccaacagggatttgagagaaaggagatctgaggaaatccagttccactagggaatgatcccacagaaatggaatcttccagcttgagaacctgaagaaagtgactcacactacatgagaatttgaccctatctgatgctactttcaaacatatttgagtatttatagtttctaatttttggaatacgtagctttctctataattttgataccctatctccagaaaagatttattataaagttagagcacaaagaaagaaagatacagttgtgtttttatcattacaattgctgccttaagcatttctttctgtggtctagtctaagttattaaacctcattagttttttacttctggttagtgctgtctccttgattgtggcaaatgcaagttaccaatatgactctttgctacttctttccataagaagacaaaatatatggcaaaaagagaaaaaaactctaggattccaaattataagcactactcatattgaaagttagaaaaagaaaatgagcctgaactgaaaatcaaacaaaaagacgagaaaaggaaatggaaataaagtttccctgtatcccattagggttgatacattaaagaaagagtgaggatagctggaaataatattttccttcaaatgacagctaaatgagatctttggagctgtgccacaatgagtgaagtcagggagacagggccggtagtgacaggaggagaaaagtgcttcttcatgtgtcagccctgggtttaaaataactcagaaggtataaaagaaattccctcctcagatacaagattatttgtgggacacctgattaccatttaagagatatcaacagttaaaggaaggtgatttaaatctggatagctcccttttaaatccagccctctgattctataaggcaaatgacaaggctgtctagacatggagtacattgagcaaggtttagatgagggagccccggagactgtgagacagacctgttctgtgcctgagaatgtcagtgatgactcacaggaggtggagaaaagtgtgctcaatgtatgggccaggctcagggagctccttgaagacagatcatttggtattaatgatacagcgataccacaaagcacaggaggtgtagcctgctagcattgaagttaggaactgatttgaattaacccagtgtttgaatctggatgcaagagcctgtatggtatcttgcatgctaacttcttcataatcttgttcctgaatgggtgccagattgaggagtctttgggatagttgatatttcttttaaaaagcctgatctatataaagctgtatcaaccacgtgcaaccactttagcataccactctatattaatagaatagaaaagataattagcagagaaaaagagccaaggaaagctaccaagaattagtgaaatataaaatgtgttcttattatcccttcctcaataaaggggcaaacaaggttgttctggtatcatctgtgggaattttacacaaactattttaggaggaaggtgggtgactagatgatggatggatggatagctgatggatggatggtggctgaagtgggtatgtgcattgaaagaaactgcaacagagcactatcttctgaagtcacttgaagttatcccaaaggtcaggggaagaaaagggaaaaccagaaaccacatatgaaattagcaaagctgagcccgagtctgaacgcactgtgaggaggaagcaccattagggaggtgatccattgccagtggaaagccagaagctcagaaccattagctgagaccgtgctcctcccaggcagggaccctctagttgcctggggagatgatctgaattcacataggaatggtcgttgcctcttccatgaggatcatgagaacatcactaggtccaaaccacaagctgttcttgtaaaagatagagtaaatggttacatcaaatataatcataactgtagtcaacctgcagctcagagatatgtaagagtacaagtaaagctctttatccacgtgctgaacatttttattaaaatgtgtgaatgaaaaactattttaaaaaatagaccaggcatgatggctgatgcctataatcccagcattttcagaggccaaggtgggaagactgcttgagatcaggagttcaaatccacccccatgagctagtcacctcccaccaggtcccacctccaacaatggggattacaattcaacatgagatttgggtatggacaaatatccaaactatatcaggtggttactgtagagaaggggagaaatgaactcccttaacgttccagctagatcttacagaagaaaataggaattagttttgatggtatacagaaaggaaaaccatgtgaaaacaaggcataaggctaccaatatgtttaatgagaataaaaggaagaaagaataagtgactaacatacgtacgaaacatgcagctcttagatccatgttccttcagtgctctttatacttttcatggcttttcccacgtaagccgctcaactcacctaaacttctgtgccccataaccagtttccattaattgacattataaccatctttcaaagcatggagcagatacggccctttttcccagctacgaggatttgtcaaaagcagctttttaaaatggttatcttcgaatgtgcctaatttttcttatcacactgtaaactttttaagtcaaaaatcttatgatcaaatcatcattaccatttattacttttcatcttcacctgtctgcctcccctctgctcaaccccagcccctcatgcagtacgtgcacaataaatatttgttgaattatgaatgaatacctaatattgacatgcaaggagtttcatgcctcagttaaaactcccagaaaatctttttccagtccccagttagagccagtgtaataacagtgactttttttcaacaattacttaaataacattattaaagcaattgttgctttaggttgttcattaataaaaataaatgtatattttctttactgttagaacagtttgattctgtatgaattcctattcctgattttattatactcctgaaaccacagcttgctgctggttcatctattaggcatttgaaatgttgaattactttgaattgcatttgttcttatattgcctaggctctggttggcctcctagggtcgtcacaccataatcttaaacacaacatgtgccttgtggcccagatgttttccaagagggagtgctgcagccaagaaaagcaagatagtatcttgaatacccaaaggggttgatatgactaaaaagcaaccgtacagccaactgtagagctgtccaagaaaaagtgagcctattatttgtatagtttaggtttttgtgatcaaatagtaaaatttgcaaaagtttcatgataagatcttttgcttcacagattctcgtaatatctgcttttgtagtgtggactccagtgttcagcagtttgtagataaaactgggatcgtggcaacaataagagaaatcaaaaaaaaaaaaaggaagagttcatggactcttgtttcttcataaatgtgacatgataaaaattacctttctttcttaatatttgaaaataacataaagaatgaacaaagattgcttctagaactaaacttggattgaggcaacttaataaacggctgtttgttgttgtttctgttcttttcttctgacaatatttaccttttatattcttgtggagagctgagatacctgcaattgtgcttttaaaaaattgttctgtcttcttgcagtgaggtctcttttttggcttacttattaacaaagaagcaaattacatatatacatatactttatgtaacatgtatacacatatgtatatgtaacaatgtaatgctatgtgtatacatatatgtatgtgtaatatacatatacatatttatacatatgaaatataaatatctatatttttatttcatttacctactagctgattcacatcgttttcataaccaaaatatagctcatggcttgagtatgaaaccctgacaaagtatggaatttcacatacatgtcatgataatgtcctagtcagattcagtcctacctcttgcttctgaaaatgtgctagcttctgttctaatcctaattgcatgaattagttcattgtccagtttagaagagaggaacgagtaggaagctgctttggttctggggtcaatctaggacttcaggtctattttagggaaagcattctagaatgtccttgcccttcctgatacactttgatataccttcaactttgagatcattgacttagtgttatcttgaatgagggggtccaatagagccagctactccatgctgatttagatctcaatgcttttgaaattcaagtttttaaagcacttgactctctgttttctccaaatgaaatcctattttgtatttaaaacagtaagaccagatttccccttttgaagtaattataggatcccaagaacccttaattccactggtcccatggtctacttatccccccgccccccacagcaagtcccttacccctgaggcagcttcagcgactcctccactcacccagcactgtaggaaaatgtctgctgtgctccagccagagcagacctactgtattgcaaatttatcgtggctggaccatcctccagagatgtatgccataaggacaatggaggcctcagctaagtacctcctgctgcattcattcccagggtagtaggtggtatagctgcaagacacggaacccagtattaggccttgctccattttctctaggcttcaaagctctgagccagtgatagtttataaaagcccaggactccaaagaattaaaatcagcacctgtagatctcctggtgaagataaactccatgggcatgtaaagaaagcaataaagatacacacatagtttttttttttcttttgaatatcaacagtaaccttgagcagagtgactctttatcagggctcttggtacttaggctgagctggtgatcacaaaggaaagaattagaaatttaaggtgattttattttattttatatttttagtaggagtatctggctgctatctaaggaatctcttctattagttacatggaaacttggagattttattgtttccctctcagtgtgtgtgtgtgtgtgtgtgtgtgtgtgtgtgtgtgtgtgttagccatttattaatcctaactcccccaagaaaagacaatctataaatttcattttcactcacattaaaaggtgagatgcaggctgggtgctgtggatcacacctgtaaacctagcactttgtgttgacttagtgttatcttgaatgagggtggacagatcatgaggtcaggagttcgagaccagcctggccaaatggtgaaaccctgtctctagtgaaaatacaaaaaattagctggacatggtggcgggcgcctgtgatcccagctacttgggaggcaggagaatctcttgaaccaggaatgggaggttgcagtgagccgagattctgccactgcactccagcctgggcaacagtgccagactccgtctcaaaaaacaaaacaaacaaacaaaaataggtgagatgccaattctcttcctgactctgcactccagtgcagtgctccatttcccctattgataataccaccccaaacatacctatttttccaggaccacatttcttcaaattgcactagtcatgctgttaagaaacacagaatctaaaaatgatctgagaaaaagagaattgcaattacaaccacaaaattttctatatactagtgaatggataaagatatttattgtgacacattgagcaatttttttgaaagttcatgtactcttgctcaactgattgaaactttgggaaaatgtaactttttgagttgtaagatcatgtaaaagttaaatgaaggaagaacagcaaagaagttatgggaattgttgttgtgattaagtagttaaatttgtatatttttttcctgctgattagggagttgttactgaaatacgttagcaggatccttcttttagcttttcacatgaatatttgggttgctttctgccttgataattaaaagagaattgtgtatatcttgttttccctaaagaaaggtgatactgactttatcatgtcatcataatcttcacagctagtagtgaaatacctttattgaacatccaccatatatataagactgttctaatctaaactcaataaacctttaaggtctatttcttattcttcttactttatttccataacttaattagccttcaaagcccaattctaatatgcataatgacttgaagtattttccaaatacaatcagtgatttttttgtgtgtgctaagtgttctcaggacagggtcaaaactacctattacatacattcaccatgagaatttagcacagttggcctctggcaacagactcaaagatttattctgtgtagctattttctagcctgctggattccagccagttgcctaatggatcatgagtgagtcagtttcattcagtctcttagcaaagtcaatttgtccagcagcacacaattttctgtcatgtagggtctttgcctggcattgctgtgacaaacacaatctaactgttttgcttccctagattccaactgagctttggccctggaaggctggcttagataatcaaagtcccctctaaggagggaaagatggtataatgaaggcttcctggaaaaattagaccctacaatttacccatctccaaaagtgggtcatggaacaaaaatatccatgtattaagttagattaatatttgtgtgtgcaatgaacaacagcatttgccttttgattacttcgggcccaaatgagctttctcttttaagtagcagaaaaataacaaaagcagagtacacctggaagggacagaatagtcacaggccagtgttgtaagagtcagtgtggcacttctgaaggaaatctgccgagtgcatgggatactagagcaccatgatgggcaggaggagaaacaccctctttctctaccttccttctctaccgccactccttcgagatggccaagtatggaatttctctgtcaggggtcctgccacctgacatgtgcaggtccagttaggtagttgaaaaggacacattactacacttatcagggttctcactacaaacaaattttcatagtccttctggaaataagccacatcaccgaatgcctttccggtagctgacatgattgattgtggacaacgaagaagtcacttattcctaaggaagagactggagtgagggttgctgtttgcacatacataaaatcctagaagagataccaaagctacattatgcagaaagattattattttagccagtggctctgaggacaacctcatttgtcttctctatgggtcactctttttttttttttttttcttttgagacagagtctcgctctgtcacccaggctggagtgcagtggcacaatctcggcgcactgcaacctccgccttctgggttcacgccattctcctgcgtcagcctcccaagtagctgggactacaggtgcctgccaccacactggctaattttttctatttttagtacagatgaggtttcacatgttagccaggatggtcttgatctcctgaccttgtgatccgcccacctcggcctcccaaagtgctgggattacaggcgtgagccaccacacccggccaggtcactcattttttaagtgaatattttcatttccaaaaaaaaaaaaaaaagcctcatgtttccaaagtggcataaaaggccctggcatgtagagtgtagaacagaggctcctcctttttagccagtctctatttcagaaatcattagatagaacatacttggtctgaaaaaaaactatgaaattttgatcccccttggagaaaatgtactttaatgtgtatattagttttcatttccttcctctgatacagtaaagtcaaaattttgcgaaccattgtgaaataaggagatatgaccccataaacacaaacaattttcgttcccttgttcctacatatgtttgttaggagtacataaaagacaagttagctctatagaccctctaattttgagaaagagaagcacagcattttcctctttgattctgttttgaaagagtgcacataatgatgcatacctcatgcttgtctgccttcccctggactttaatttcttcctgtccagccaaaggagaaggtttttggcttggtttcagctgtgcttccatagctgctacacatcaaacctatcctaccaggtagagactagtgtattcttttcactgagggtagatggtcttctaactttaatcttccattctgcctgtcacgtctagaatctatctggttaaaactcacgttttaaaaatgcatgtcctaaattgtatccaacacttgttagtatcaattattatcataatttaaagcctagattgcagatgttcatcgtaatactttgccaatattcttatgactgtttcttttttcccatagataagtgttccaatttaagtgtgttttcctttccagaatgttctgtatgtaactcttctgacatttcagagattgtgttattactaatatttagtctcgtgaggtgcttcattttttaaagtattctttattgtgttttttcttcatgacccatcatggtgctcgatcagttccttgttttttcttttgagcatgactaataataataaagtctgagctctggtctcatatcacatattttaattgtataaaacaactatgaagacccacactgacaagatcctgagcctaaataaaattaggtcatgtctaaaagatattgtcctttgaattaagcagaacgtgtgggtgtgtgcacatgtgtgagagagagggagagtttgctcacacacagccttgacactgataatattttcccagacagcttctactcagtgactttgtagtaaaatcaaaggagctttagtgtgtactcattttacagattagaatagtagagcccagagagagtaagttatttgcctgaaatcccacagcgagggtccacgggagctaggactctggctttcaggaccctccttgttcagtcctctttactttgagtcaactctgacgggacctggcatggtgccctgcaattactgatgatgcgaaaggtgagagcggatgaaattttagcacactgatcaatcttgagatactaaaatataccagcaaagttgtgaactcgaaaattactaaacaggctgggcatggtggctcatgcctgtaatctcagcactttgggaggtcgaggaatgagattgcttgagcccaggagtttgagatcatcctaggcaacaagaacaacaacaaaaaacaattagttggggatggtggcgcatatctgtaatcccagctactgaggaggctgaggcagaagaatcgcttggacctgggagttcaaggctgcagtgagctatgatggtgccactgcactccagcatgggtgacagagtgagaccctctctcagaaaaaagaaggaaagaaagagagagagggtgagagagagagagaggaaggaaggaaggagaaaagaaaagaaaagaaaaaaagaaaaagactgaacaaaacttgagaaaagcaatgtacccttatcacagttttatgggaaagtacacaaatgagtaaaatgcaaaataatggcattttctgtactgagaacagagataccacagagcaatcgaggaagaattagttatactgttctctgttggattacaaagcagaattctgaaaagcacacgttgtttgacacgcagtgtgaagttgcttgacgttcactgtgatgttggctgggacactgtgccgggtatgtgtgggtctacagattcatcaaatggcacatggtcagaacgaccttctttttgctaatgtcattaagtgccatctattaaaaatcaggtgcttacaaatgagagtatttaaagaatcagagggagcaaggtattatgtgtccccttgttatcaaactatattatccaaataaggatatgatataatcaagccaattctaaacagtccaaaggcaaaacaaaagaatgtgcccagtgctttcagccagtgtctggatgctaaaaatcagactgactagtcaatgaaagcgaccacaaaattagatgattttgacccaaaagaatgccttggcctcccttcccagagtgtttgccagttttccatgtctgctcttcccctcttcacccccagccccaggtggaaatgaagatggttttccattttgttttgaagagagagcttcatgtcactgatctataatgtgaaggaaaatatcttcatcaaaaccaacattcttaggaatacatagaaaataaaaagactactcatgtcttagaaaagttttcccaaaagttggatcatgttggataatgttatgatccttttcactttcaaagttccctagttcccttagagaggggaaaattatattactggtagaaatcaacatttccttttctttagtgaaaaaaataacacagcactctttaattgaaacctgtgtatctttgccctccccactttctgcctttgctttttcattcacatttaactcctgcagcaacaataacctctgggctgttctgcattagagagaactcaagagccctggaaattataatttcagaagtattgataatattaaacaacatcaaaaatttttaccacttttgcctgcccttcttacttttttcacaagttaattgaagatggaaggcagtaaagcctcgtgattctttttcaaaaaggttaaaatacaatataatctatcttttttttttttttttttttttgacacagagtcgtgctcttgttgcccaggctggagtgcaatggcgcaatcttgactcactacaacctccgcctcccaggctcaagcaattctcctgcctcagcctccaagtagctgggattacaggcgtgcgccaccgcacccagctaagttttgtgtttttagtagagacggggttttaccctgttgccaaggctgatctcaaaactcttgacatcaggtgatccacccacctcgacttcccaaagtgctgggattacaggcgtgagccaccgcgcctggccaaagtaatctatctttaaagatggtctgctatccttaattgtgtatttggtataggttaatagagtgaaagtcctgtaagctataggattagatggacgttgcctgcaattcaattccatctgtagagcagatttcattgtcacattaaacattagaacttaagaaacaagttcttcagagaagtggattgagaaagattgaagtagtattgtgtgagctgagcttgagtcagctattctgttggagaatccctaggttacatcagagaagatagccgtgggctagtcacctctatgagctttgtcatggctataattttcatcaccagtcagtccttcaaatagatatttcttagagatgcatgggtaattagagaaactctcaattcagttattaaatttttcctactcatatccagagttaactgctcatttttagcttgaacaaattagaggattgcttagtgctgaatacttgtctctttgttctataagcttgacagagctttcttattgcctatatgataatgttggaccatcttcaagtgtctacagtctttcctggggctggtatggtgctccagcataaatgcataaatgtgtaatgcagtggaatttcaactcagtgataaaattctctaaaagagagaactaattaattttagagccagaaagaggcctatatccaacctatttatgtatgtgctagagctggttactacagagcaaattagagaccaataaaaagacatggtgatcacttcaaattgaactgtcttaacagaaataaattgcagaagcagataagattttcacaaatcagtgcagtatggccctgttactttttatagcatctggattatggcttagacttattaagaattagaaaaacaaatttcagtgccatcactgatacctcaatataatatgggacaagctgttagacatcaatatgctgaaaaatggccaggcatggtggttcacgcctgtaatcccagcactttgggaggccaaggcaggcagatcacgaggtcaagagatcgtgaccatcctggccaacatggtgaaatctcatctctactaaaaatacaaaaattagctgagcatggtggcacatgcctgtagtcccagctactcgggaggctgaggcaggagaatcacttgaacccaggaggcagaggttgcagtgagccgagattgcaccaatgccctccagcctgatgacagcgagactccatctcaaaaaaaaaaaaaatatatgaaaaggtaacagcaattttcagtgagtaagcatataagtaaaggataaggagagaattgcctcttttctgtcgcattcaaggaacagctggaaaatggaagaaacatagaaggagagaaacatcaagaaatacgtattagtcattccactgtaggaaaagttcattacaggagagtcatgcaggcagacagggtcttcttagtatcaaggactgattttgataatgtgcccacatttcagcgagggcgttttaagacataagcacagcattaaggtgtttcaatagcagacatacctgtctttattgcagtggggagaaagcccaggctcatgaaagaggcgtgagcattcacgggaaggaagaaagaccaaataaaggcctaggaggaggtgagccggggaactgtacaagggagcaaaggccccttcttcagatgagttcaggatggccttagcaccagtgcttggggaagaatggctcacatcctctatggcttaccctcttcttccaaggctaattttggaggctttctagtctttcttttgggatcaaatatatcatgaaattgaaacaataaaaccaccccccatagagctgttacttggttttcacttttcatataatattaaaatctcaggactaggagcgatttccagaagctattaagtctaaccactacctccagacagaacttcacctagatagactaagggaatgtattccttattgaaaatatattccacctcattcatttacaaataaggtgtaaaccttcctggaaaaaaattcacaagtgccattataaatgcttctatggataaagaccttaaagctaacccaaagttattttgccacatatacttaggtgtcttaaataaataatatgcattctctcgattccatccttgtgaatttgcatttgggttcccacttcttcaaaagagagtgtgtttgttccatggccaattagtttgatagtacatataagtaattttgcatggataaaaactaaccatgcaactttaactctgcctttaattaagtaatcattaaaaatgaaacttgtctacttcctcctgttctgtagttgacggtgattgaggggcttggtatggctgtagtggcacaaaaatggaaatcagtaaattagagcagttgtcagacccagattctgattagctaaacagcttgcctgggttagtgattaatgcagttgtagggaatgaaatctgctttcctagaaaagtcaatagagaacgtttaatgaagtagaattatgtgacagttgtccagttgtgtgaaccatctttgaacttagtcaaatgcagatgtaattttatattaagactttaaaagaatggaaaaatggcttcaaacataggagaacaaaattttctgctttctttgtttacttcttattttatgtcaccccataaatgtgattggtacggcttttgagattattggtttagaatttcttaccctttgttgtcttgagccatcttttctctagaaacatgctaatattacagatggttcaaatgttcctataatgtcaatgtgtaaatccatattgagcaatgtagaggtccggctgtgaataggacaaagaaaaaattaagaaaatatttaaatgtacatacctccttttctaggatttaataactcgaattatttataaaatgttattgacaactttattaaaagtataagttacacgttataagattcacacttcaaagtgtacgattcagtgtttttagtaaagtcacaatgttgtacaactcattaccactatctaactccaggatattttcctcattccaaaaacaaacctcatacccattagcagaccccctcccatttcctctttccaccctttccccagctattcaagttattttttaagcagatgttctgattaaaactctgtatctgtctttggtgctttagctagcaaaaaaataatgaatataaaacaattgcctccccatatatattggtatatataatttattagaatgtttttcttttcacttttaatgaaataataatgaaatttcaatatgtataactggtgaaataattttggcaatactgtgagtgaaatgatagggcaaaaatgaatgcttttatttaactcacaattgatataaacaaaaaaatcaaatgatccagtcaggtcgagggtaaattctcttaaggaaataacaggtaaatacttttccttgagtgtaaagacacttatgtgtatttattaacacatacatagaatttagataagaattatctttaaaaatatgcatccttttaaatttattcaactagtattatcttttcactacaaacacaataaatcctggttttgcttgcctccactagtcgatatcttgagttaatcttgcacatcagctgaaagaatagagttaaagtttgtatctatgaatagaaggacttgataaactatttgataatgtaaataagagtagaaagggaatatgtagtgtattatgctaagatagtatatgtaattcatgtgagtgagcacactgatacattttaagataagcaagtgccagattaatgcatattcttgccctgattccttttcatcccctttcccttcatttcctcccctttcccatcctcttccctttagacccttgtcacactgacctgcattcacttactggaactggctatgtcccctcctgcctctgggtcttcaagcaaggcctctcctctgcatgtcttaacccaatccgcacacctcccacaccatgctggccctttgcttacttaaattaacttatcatccttcaaatttcaactcagtagtacttcccctagaagccttttggaactttccagaagtcgggtcctgttcatgttctcagagcaccctgattttttggaagtaacattcatgcttctatcctcatcttctctattttcaaagaagaatcaaagaatgtatgtatattctaatatatattgtgtaagtatactaatgattcaatatctttttagaaaatctgcaattttggactttttagtaagtcagacatcttttgcttctgagaaatctgaactattttattttgttatgactgtgacattcattccatgtgttgaaatcaagacacaagaatgcaagaaatgacgacttgccagtaaatgcccagttttcactattaaaaaaagcctggcattgctctcccagaagaataacaactcagtgatagaggggcgtaaagaccatggggccagcatatttgaaggtgatttttaaatattaactgttgtggtcttcaatgtgagtaagcctgcatttttcaaaaggtttcatatcttacaaactcctgatttctccctttattaaaatctattttgaagtaggccaagctgtcaactaaagtgaatgttttcaactaaaagatgattcactttctaacttgacaaaaataaatggagaaaattatagattatagatcaattatcactttctaatttatctctatgatttcaccctgatttattccatgaacaatttaaggtattttaactatctgacattcatttagttgaacaaaaagaaaacgtgaaaccttggtaaataagggacccccttaaactgaaactttcctaagtacatttgaaagtccataaactgacaatggataccaagatcatgagatcacaaatgtgacttttccttaagatttcatcacaagataaatcaaagtgctaggaattgtattttcccttttcctagtaatcaagtatccttctcagatgactctttttgtaaaagtaacaacttctcatctttgagacttgactcacataccaaatatcaaaaatggaaaatctttgaattctttttcctgttgtgggaatacgagtcatttataacaacaaaaaaaatcgataggaaatggatgttttagggaagtgtatcctgagtgctgtctttaaggcattgattggagactgcccacatctaaaaaatgactctaggacatcactctcatgtatttccgtgaaaaagctggtggaaaaatgtgttttcttctaaaaggctatgtgtgggacgtgtgtcagtgttcacatgtgcctaataggcatacgtaaaatcacacttgtatgaaaatcaagtaaatctgctgaaataaacagcaacccatgtttgggcatttgtgttggtagagattggcttttaaaggagaatggattaatatatgattctcttgtcggtattactatgaattgttcttttttgaggaggagtctcgccttgtggcccaggctggagtgcagtggtgcagtcttggctaactaccacctcctcctcctgggttcaagcgattctcctgcctcagcctgctgagtagctgggattacaggcacatacaatccacacccggttaacttttgtatttttagtagagaagggtttcgctctgttggccaggctggtctctaattcctgacctgatctgccttcctcggcctcccaaagtgctgggattacaggtgtgagccaccatgccaggcctgaattttcacttgcaaaattatcagtcagttcttaaaacttgaggaagggaggagtcaagaaaatgaggtgaatgagaaggctgtttagactgtttttattgtcttacagtcccatttttgtctttcactcttccttctctctaatggctgggttttcaacaataatacaggcaagcataaaagttagcaaatgagggctaacctagaattgcaaatttgattgggtttcatgttggttttccttaaataaatcaacagttttaacagggtggcatttaattatatttgtttacagaaatatttttatatttgaatttctttcataacagtgtttattgtggtcaaaggatgggagggatgaggaaataatatttgaagaccacaggggcattcctcacctctgtagtcttattatctggccttgaaacactacgacattctttaactgaatttattaggggctgaataccaacaacataagtcagaaaagggtttacattgacccctttggattctaaatattgtaataaatattattagttccgaaatatcatatctgtttgatttcccaaatgattgcagaaatgctttgatctttttagtcctatgatattgtagagatatctcactaatgatgttttttttttttttttgagatggagtctcgctgtgtcgctcaggctggagtgcagtgagccatgtttgtgccactgcactgtagcctgggtgacagagcgagaccctgtctacaaaaaaaaaagaaaagaaaagaaaagaaaaaaagaaatgtaattcactttcttctggtcagcagctgacaggatagaacacattggactagaaacctgttgtattcttacttttacccatgacatggcttcttttagaatacaaactgtttagaactaagacaggaaaatttaacaaagcattagatataaaaatgttcacaacatgtatggtctattctttaatttgagaatattttaagaaaatttgtggttgaaagctattgctgtcattgaggtggtgttacaacacaatcgatctttgaaaaagtattggcttcaccagggaaacactagacctctaccccagtgactcctgctaaagaggtctttgccatcgctgccctttctgatacctttgtgtgtgctcagattggcacactgattaatttcagataccatcagcaaaaatggaatatgctgaacaagcacttacaaagtagtggttcttcatagaacagagttgtagcccttcagtaacaaagaatgagtcagaggaaatgagttaatttaacaaattgctagttgcctaccagatatcatagcaaggaatgatatatgcaaggtgtgttaaaggcaatgtttccttaatttcttctttctatctcccatctcccaatgtcctctggggaggccgtagaggtgggagggacatattaagtaaaaagtgtgaccacttgctgagtaatttttagtgatttgttgagctggattaagtgaatttagagttgaatcttcaaaatgatcatttcctttttttaagagtttatattctggatattttcatttgaagagcagtgatagtatccggctaaggtttactaaattgttcaagtgagtttgcagaagactaagtgaaacaacttctgtataatgaactggaagattaatctgcatatcacataagcaaataaaaaacaagcaatcatatattttataatggaacaaccgtaagataaacaaacaaaaggcatagttaaaaatctgtatgaaaaagcaaattcttggtttcccaagaatccttggtttcccaaggctcaagaattttatgatttgagaaaaatacttaagtgttgcctgcacttctgtgcaataaatctcattatttcatactttattgccactactgtcatgaaattaatggatcacatttaagtattccttcttggaaaaatatcactaaaatgtaatgttcctcaagtcatagtgcaaacaaaattatatttatcatttacagacaggttttattggtcctggtgcattcatctgctgatggccaataaaagctatacaaagtctcatcaatgaaattagtaatctgtggggacaaacatgccattagtgcctgtcattcgagatttgtgatcattgacgtgctttttatggcatctgaaaatattagtttgactttaaaaaatgtagagttgtttctattgttggatatatttataaaattctgaacataaaaatgctctttggtagccacttgaatttttaaaactatatttaataaaatacagcttttaggaatagcaatcagcatgggataggtgacaatgaattttttttttttttttttgagacggagtctcgctgtgtcgcccaggctggagtgcagtggcgagatctcgctcactgcaagctccacctcccgggttcacacctttctcctgcctcagcctcccgaatagctgggactacaggctccagccaccacacccgggtaattttttgtatttttagtagagatggggtttcaccatgttagccaggatggtcttgatctcctgaccttgtgatctgcccgcctcggcctcccaaagtgctgagattacaggcgtgagccaccgcgcccggccaagtgacaatgtattttaagtagcctctgctatccttgacgaaatgtgctaaagtggcaaaatgtttgctttagagatgtacaaaagtagaaaatttgtgaaggacattaggtgtttctccactttgagaggggatctcctcttgatctactctttatttcccatcccagagtgaacaaggtactagttgatgaattcgaatcaggatacttgaaattaagacttagatgtagcactttgtgatctgtaaaaatcatatcagatcttaaatatgaaaatgtttgagtttagccaaaatcaccagcatcattggtgtatatcaagtttaatcctatccttggaataatagaacttcaaggttggaagatgaatcttgaatagtttgaagttaaaccctacctgccgttgcaatgagtcccattgaaaaacatttcctacatgtcctcgacaagtctttgctttctttagttacaaggaattgcccaacctaccaaggcttccccattttatctttgactatttctataaatttctttttaaaaattgtggccatattttaagacacagagggagggtagacacctagatctaaaggatattaatctacttaagaggaatttgcttatggaaagatgatctagcaaatgagataaactggactgataaaaattatccaaactcaggtttagatgcctatagcagtttcacaaaaactaaatctttgtctctaatggatctgagctgatagcagtgtagtagagaccaaaggtctgtgactgtcgtggagaagccccttttggatgaagctttacggaggattttcaaatgttaattatatttacaaacagatcagatgtaggcatagatatattagaatactttatatcttctctcatttatttttctactgctagataaatgggacttataagtagctgagtaggcaaacaagaaagaatgcatacagttttatcaatttatctgagattttgtgataagctacagaccaagtcaaatggactagttttggcaggggcttgctgtccatatgatggtcagttagcttttttctgagttaaacttgaaaactaagaactttaagaagtgcatgggtatatataggtgtgtgtgtgtgtgtgtgtttgtgtgtaattttacaagactgtagaattataaaatgacatttgttttaaggaatatttgattgacagtttcacttaccaacgttagcctctaattatgacactgaggatacccaaatttaaaaatttcctttataatggtccctgagacctggtgattgaggtcataaaaaaggaatggtagttttctttcagaattttaaattttctcaaataatatttcaccaaatattagccacacttgtatactttgactctgttggtcgttaaaatgtatagtcataattactcctatggaatagggatttcaatagaaagaaagctttagaaatgaatcttctttgcagataaatgctatttaattttcagagttaatataattcaaattatttagaagtttacaagattctattataaagccagtttatttatttttttaattccattatcatctgaatattctaaaaaatgtaaaaagaaatctatttgtagagaaaacaatgccttttaaagaaaaatgtattttgtgctgggctgcagtcttattcatcacttgataaatgatgcttttaattcagataattagagtaatttgtaacaaattattagatatagcagacttgccattccatttctataaaataaaaatacattgtaatgtttacattgatgagtaataataacaacaccttagtagttgtaacaatatatgacctaaaatcagtggtaataatgtcctatgataagaagattgtacaaacttaaaagctagattttctttcaaatcttttgtcatactcctgagagaaagatatgaggggaaaaaagtcactatagcaaaatgccttctcagaactgtttcagagcaattgaggggagaaggaaagaatcagtcagagattgtttcaaatttaatatgaaataaactgttacctttaactattcagcaatgacacagttatatttcattccaaaggtgtttacaatcatatgagtgggtttctgtattcaatgttacaataagtcaacttggaatttcccattaaatatgatattaataaaagatttaggtacagtcccctggtgtgtttgaagctgtgcactctgcaaacacataaataaaaatatatctaattggtttgtggcattttgagattttttttttcagaaggaatgtacttaaaaaaattaaattactgcagttttctttcagaaaattgggcttttgtattaaataatgctagtccaaacttaaaaataagaatatttaagcctggtaagcatctttgttctctcaataaaaagaaaaaaattagagactctctttctccctggcctcatacccccatcatcttctgaagttatatgtatatgaagtattttttttaatctacagggataccttttaaataaaatattcctttattatcataaataatctgtaaaacaaaataatagtggcagtatttgtaataaagtcctaaaagttaaatcatccttattatacttaacataatccaaaagactcctaattaagttttcctttcctaacttatattatcttatgatgatctacaataattttgatgatgttctcaaatgttcttatatctgcttctgaaatagttaaacagattattgaaaaagacctctgaaacaaagcaaataaaataatgcatagaaggaaacagcttttagtcttatctctaatggaatcatgttattgagttttctaaattatggaagatgtcaaaggtcatttagagctagacttcatgtgaagaattcttaacttgaattggcttcagaaaaagaggtccatgaaactccaaaattgtatgcttggtttttatttgtacatgtaaacaaaaattgatagctttccccaaattctgaaaggagtccttagctctcaaaatactgagaacctccattgaataagacatttgagtagggactttgtggtcagagatctgagtttgaatcccagctctgctattttccacctgtagggtcttggcaaactcctaatctgtctgagatattgtttactttctaataagtgcaggtaaataatacagaatttacaggttattgtgagagcctatgagatcatgtgtatttttgccctggcatgttgaagtcacacaataattctttcctttctctcggtttctctcttttaagatgacaggaatggttagctaaagcaactgagtgttaacatgagggttcctgctctattgcttgttatcacacatgggtacatataacagtgactgcctataggaagaagtcattaccccgggacagctttcactggtggatttttatgatggaaagcaaccgcattaactgcaatatggcccagggtgacacttgacatctgtatgttttatttttattaaaaaagtaatttaaattattgccttttctttttattatggaagaaaatgtaagaatgttgactgttcactaagccgaagattccctttttgctttcaaagcttttctcaaggacattaaacactcttcctaattactttttattgatttcttgacatttctactcaacattgactgcttatttttaggaaacaaagaagcctaagtgaaaaatgttaatggtgcatttgaaactacaaagttcaatattttagtcacgcctcttatatgtaattgtaggtaaaaactatataatatttttgccatgtgcctcagctctcttatcaccgaagtaaatagaaaattctgtgattctcagatttcttccatagctttaacttattttgaacaaatctgtgacttaccttgctatatttcaaattttattttattattattcatttttatttttatttttttgaaacagggcctcactccattgccccagctggagtacagtggcatgaactacagcctcaatttcctgggctcaaatgatcctcccacctcagcctctcaagtggctgggactatgggcccataccaccatgcccggctaatttttaaattgttttatttgtagagatggggtctggtactactatgttgcccaggctggtctcgaactcctaggctcaagcaatcctcctgcctcagcctcccaaagtgctgggataataggtgtgagccaatgagcctggcatattttattatatatatattttttgtctcaagaggttctgagaacatgtgtgcctgtatttcaaattttaaatgagtgaagataaggcttggcatagtcaattgaataaaatttagtaaaaaatcaacggaatactgaagagactgatgaaaattacacaaattaactcacattttacattgttcttccaattttgcagttatttgccattagtaaacactttaaatatgtctgccactctgatttttagcattatttttgttaggagtaactatgtaaagcaagtctgattagatgatcctcatatgtaatttaaccaaacgaaagatgtcttatgttaactatttagaacagcccatttatttaaatgttgctcatttaaattacttgacagtcaggaattaacttttaattaaggagtgctaccatcagacctatttttaagagtttcttgtgtgtgatttgcatgttatatacaaatgaggttaaagaaaattacaagtcaacaaaatgaacctaacatcaaatgtccctggagataatttttttattttatgtaatttatctgcatctcttatagaaatactttttttgtcttttctccctatctctttgttgtgtacaatcagcttttaaaggatccagtggtattaattttgcattgcggtcaatcagagatcttatgcaaatattaaatattgcacaggcatcataactaaatttagcatttcatttggaatagttccttgtgccataactccctgatggtgtttataactcagcatatttatatttgtatgtgcatttttatgtatatgcatttctctttggtctcataaaaaagtaaagtgtgtatttttttctaactctacagtcattactaaatgaaaattaagttgtttttaaggcatattttttaaaaggaaaatgatgttaatctgaatgaaggttaaatagaatcccttataacactctggcactatgtggtcacatcattgaatttctgataactttcatattatactttagtctaactactcaagatcagtttagttttctagtgtttaggaaagcttaatgaaaaatataagacaacagacaactagaaaactagacagataaactgaaacagacaacagaaaactagataatatagacagagcgttttccgtgaatgaaaactaaaatgcatcagtttgactcacagtggcctcctgccttctgctaagtatgcacaacctaaaggtaatattttaagtctcattctctgacaatgtagtttgcaaacatagagaaatattcagatgtagaagaatatggcttctctaatggccttgtttgtttttagctacaaggtgacatatatagttctggaatgaaagaggcgtcatcgggcagaatatttcagtggctgtattatgggcctagcaagtaacctgccttggaattcctctttattattttgagaacaaaggcatgccatttaacttttttcagcctcagttttttttttttttttccaactgtgagaaagagaaagtgtcacctatttcttgttaaggactaaaggtgttaaaatgctagaatgtctggcacatagtagatatttaatgaatgtcagtttatcttgtcttagctaagaattttcatgctttactatacagataactcttggattttatctgcattcatttcttctccaaaaaaagggaaccaggaagaagagaagcaaaagacataactttacaatgcctagctaacattatcaatgccaaacacctactggtcgtggtaaaaatgatttctacttcaaaagacaagattgctgtaaaaaatcattgctacactatgaagttatgctgtaatgttacgctatgaatttgttgtgctataaagaggaaagaagatgtttaagaacaaaacatgctatccagagcacacctccatttttgcaattacaaaatgtcttctttctttgcttctcatttctccagttcctccctcgtgacctaccttgaagatcacctataagcagaacatgataaatagcatgcccagtagaaatggtagttgtgagcacatttaaagtgctctgtgatgttttactctcagctgtattgaaatatagttggtgatgactcattctagaaatatgactattaagaatgagtacatttatttcttcaataataagaaaaccaacagaatggtaatcccagaatcttagttctacttttaacatttcacacccagtaagttggataacggatggcagagtgagcctgcgtaggtaataacttattattattacccttaccgtacatggcccttttccttgtacttttctccttgagccaataatgactttgatggttcagtctttctgcactttgtagaaaccatatcccaaacagtattttctagacatcaattctagcatgtgaaagaatctagacagcctctccgattttcatgcttctgggacagaaaagtatttatcacaggtaatgatgataatccagttaaatttgttatgcctttccttactttcaaagttaatttccatttttccattttggatgctgtgttttatggaaattgtctgtaaagagtctactagccttacatgtaatggtcagcagacatatttgatacctttctttttcctttagtaaaaggagttgtaagtaaggagcaagtgaaaagtgaaggggaatttagtatgtctcctatttggcagcaactgcgcatgctattcaatctttaaataatttttaaggaacttgtctcttattgtaaattatgtctggagaattagaagtgctacacataaaaattctgtctttggaatcagtacagatccatgttaacctcgttaaaatgatgacttctcatctaacttcaaatattcatttttaccttattaagtcatagagtttagctaagcactgagggtatgtcctttttgttattttgattctgaaatcctcctgatggtttttagggtagttatggttaagattttggtgccacgcctgatatttcctaccattactgtggtagtgatggatttcttctgtctggacctccgcttctagtggttctctgatctaagcatggttggaactttgtactgacctcatactatgcctagtcacagagcttgtaaaatacagccaaaattttattaattcagctatatctcttatctctagaattggatcatccatggctcctctgtcagagttgtgaaaatggtcagctttgttacgttgagcctgaagcactgatcccacaaatcaaaagaccacgtgactcaattcctagctcagtcatcttttctctttcgacctttgtgtatatacttagtgtacctgtctctcgaaagtgattccagcaacatagattacataccccacttaacagattaaatttcattagacttatcaacgaagatcctttgttgccatattgctgctatgatagtcctatataggaaactccagcttcccatcaggatttgaagctagactttaccataaattgcaacagctgccagcctgttgacccaagaaatgtggtgcattcaaaaagaaggaacaaactcagacaagtaaccagctctgtacatcaaaaatccttccggtttcggtaaactatcctgtgactatctaactttagtccctgaagggtattacgccttatttaccttacaaaactggcatcctagaccttcctaattgagttgaacttcaaattcattgtctaaatcctaagaaatgttgaattttcacaaaccccatttcctgcctgctctctccttttctcccatacatccaccatcagatttttttttgtttactttctctctgataattcatgagtaagtttaaaaaaaaaaaaatgtgtggccagagttttctgttttctgtagatattgctgtgggtttgcccatgcctagttccaacttttaaataaatatatataataatatatttatgttataaatatataatatatttgttataaatatattatatatttatataattaaaatcttatatgtaattataacataaatatatatgatattatatacatatatatatttctttttttttgagatggaatctcgctctgtcaccctggctggagtgcagcggtgcgatctcagctcactgcaacttctgcttctagggttcaagcaattctcctgcctcagcctccccagtagctgggattacaggcacacaccaccatgcccagctaatttttgtatttttggtagagacggggtttcaccatgttgagcaagcttgtctcaaactcctgacctcaagtgatctgccgacctcggcctcccaaagtgctgggattacaagtgtgagcccctccacccaaccgaaaagaaatattttgatgctatgaatgcatttgtcatttctattctgtttcatccatgtgttcttcttgtttacctttgtagtagtcatttacagtgaaaataattgacaaatgacatggtgttatgttcttgaaaacaaacatacaaacaaaaacaaaaaatgaaagcagacaaatgaacaaaatggccaagtaggtgtttaaaggcttaaattgagcaaagaataaaatggtattttttaaatgttaaagaatgatgatgtgttttaatagtattgttaactattgaatcaatttatgtttagtctgcttaaaattatatttggattcaagatggactactgctatcaattgattagattgaaaacaagcaagcaagaatctagacaacacaaatgggggaaaaaataatgagatgtattggacactttcctggctgtaggaaaagagctttgataaaaggagtgatgagatataattaagcacaaagtaacctacatgcttatttatcagtgaatctttcagttccagatcatttcttctacaaaaaactaaagaataaaaatcagtctttcagtcactgggtgacaggatgcactttgatttttccaggaaaggaaagccaggatcacaggcatgcgcatgcacacacacacaaacacacacatgcacactcacacatacacacacaagctcaagcgcgtgcacgcacagtactttggcaagtagagtgttagctccccaagcatgagcttcaggccagactcagtggctgtgatagacccatgcagccatttgacagattttgataacctttttattcaaagcagcatgaagggccaatgaaggattgctgatttttttttaagacaggatcttgctctgttgcccaggctggagtgtagtggcacaaacatggctcactttaactttgaactcctggacctcagtttcccaagtagctgggaccacaggcacgcaccaccatgctcagctaatttttaaaattgttgtaaagacagggcctcaccatgttgcccaggctggttgaactcctgtgctcttgccatccacccgcctcagcctctgaaagtgctgggattacacgtgtgaacaactacacccaactggattgctgaatttttataacatgtctctggtaactaagatcctttgaactatgaccattgaattcctaggacttgtgtgatctcagtagagcaatgactcacttccctcaggttttcagacttagaggaaaatccaaggatcagtctgtagtataatgctaggcatgaaaggcatgaggaaatgatgggagcctccagacagaaaaggtctcccactggtgactgatttctattcagagacaatgccatccctgtgattgaagctccaacacactgaaaaggtgtgaaaccaagaaaagtctctctttcaataaaagttttccatatttcaaaaattttcagaagtaaggatttcttaagggaaaagccatgaataaatcaggccctttttttttttttttgagacagagtcttgctctgtcgcccaggctggagtgcaatgatgtgatcttggctcactacagcctccgcctccctggttcaagtgattctcctgcctcagcctcctgagtagctgagtagcctcctgaggcgtgtgccaccacacccatctaatttttgtatttttagtagagatggggttttgcaatattggtcaggctggtcttgaactccgaaccttgtgatctgcctgccttggcctcccaaagtgctgggattacaggcgtgagccatcgtgcctggcctaaaccaggcctttttaaagaataggatcagaggtctggtttcttcttcttagcaaggtcttgttttcctggtaaggccttgttttctgcttagaggcatcactacaaccagcctgtcatctgtgaactcttcccttggtgggattcagaagtgtagctcctgcatatgtctctccattatgggagtcactggattctgtggttatttaattagaacatgcctcactaggtgttggctacacctatttgagctgaactagaaatgcaaattcctgctacacatattttgcattacaaagtgttctactttttgaaagcttttgagtaaatggcaaatctcaactgaagactttgactcttctacaggaactgcatggaaatgtgaggaaccgaattggaagaatgaacacagcctaccatttggttttcaatgctttgatttttaggtggctttgtagtaatggatggaaagaacaaagatctgtattaaacacatgcttgcagcgtctacaaaaatggtttatgttttaaaagaagcaggggaagacctcagtcattctgagttattacagctccaggagatggaagtgttttattagcccatatatatatagatagatacagtgctaccaggaaaaaactaatgaattataactaaggtcctatgtatggaccttaatattccttgtgtctgacgatgcaggaatttagccaggcaagctgagataaggccctaacctttgctctacttttctttttatgatcttcttccacatgcccttttttggtttaaatataaccaagatgatttccattagatttttctaacaactgcatgatgtgtgtgcgtgcgtgtgtgcatgtgtgtgtgtgcatgtgcgtgtgtgtgtgtgtgtgtgtgcatagcagcaaagccagatgatgatagcaggatgcagaaccccaattttttttaatattatgtaatgtagaaaaggagtgtgcacacctgtttgcttccttcccattgaacaacattaggttgaaagccaacagtagaaaaacaggtgcttgttatgtttgagtgtggagccccaaaaatggaaaaagaagaaaaagaaaaagcaccgggttttagggaaggcttctttaggcataatgtaaagttaatttatcattttggccctgttccactaaagacacagaatttgcggcaatactacctccccatggcctatttctctgaactaaaatgtacattttctttagagaagcaagaactattatgaccagctagtcctggttttgggtggcgggggtggcaagaaaaaaaaggaaatcgttttctttaagtaaagcacttaaaattatatgtttttttgaaactggttttattcctgttcagattggtcatgagtgaaatgacgtagagtactttaaaaagttagattttcatgtgttatttggttaccatagaatttgtactggaaacctaacagcagatatacatttaataacacaatgtattacagggagacatgttttgctactctgatcgtgaacttgggaacaaggaactcctgggagttgtgggaaaatatatggactgaaattagccaagtgttatggagcaagattcatatgctcaaacctacttttactgcttcgttgctttccgtgcagcaatttctggcctcagtgaggaaaatgttgtgtttgtggaaacataaactggctatttatgtccacaaccatcacacaaacacagaactgcagtgatttggctaaatggtatatagcaacgtgcagtctggggttttagagaggcgtgtttcaagctgcatgggcgacattctaaggaatattaggctttttacctgcaaagccactgttcaaagaggcctggctcaaacccgaaacacttggaagattgtgtctaaatcctagaacccactttttgctacacttttagggaggctccttgcctcaaagtactgaaagtttagattgtttaaaacatttgtcagaaatcatttcctggagtgaagatgcttctataactcataggcacatcactgccttcatcatctctgtaaaaaacatatcatttcaagccaactatggtattgtccatcttaatgggatcctttatatcaacagacacgtagtctagtgagattaggaaagcacagtgacagctttacctgtaacagacgttttagtgttaccggtgagtattgcatattgagaatgggcctcagttcctctgttaacatgatgagtgtttcctagattgcgtgaagagtaatgagaaaatgtgtgataagcagtttgaatgcctttgaaagaggtgtagtacaaggtgtgaaatacaaaggaactccagcagttagctcttctcaaattttcatgtatataaatataaagtagtgtcatttcctgaatatgatccctattctttttccatcattttcttgcaaacactgttatcctcaaaccctcttctactctcacctccttcactagtctcatctccatgttttcccgttccaaaggctgcaggagagaccattagtttcattaattatggccctactcaaaagcctaactctcttcatggcctacatattaaacattaattccaaccagattatcaatggcttctctggtatggttgcattattattttatagcttcattaacttcacctccttatttataatccatgtcctagtcaaattgaactgctgcctctcaccaccaaacatgacatttactttcttacctccgcatttatttgttttttccctttagtggaatgccatcttctcccacaaccataggccaaattcaccttcttaatatatgactcttttaatatagttcccattctcacatttattgttaaattcatgcctgactgacctaactgattgatattttctgttgctgctgtgaatatgatcacattatttcactgggttttcttgatggttactactggtatccaaccatatcatctccagatcgtgattattttatcttctcatcttctaaagctgtatcataatttttttattcctgccttactgcattgattagaacttttaagagcaatgctgaatagtagcactgatagtcaatatcctttacttgtgtttgacagtcatggaaatctcccctagagtttcactgttaaggatcatttagattattagctaaaagcagatattcttagtgatacagaatatcattctagttttacaatataaagacatgttttgaaaaacctaaaatcattatatttttgcatttttaaattttaaatataaatataagcatatatttaaacaagtacatatataatatccatttaaacatgcatattaaaaacctgaaaatacaagggattgtgtaatgaatctccatgtagccatcacccacttcagccgttatcagttttgtttcatcttcatcccagtcatttcccttctctcttactattttatagcaaatcccagacatcttatcatttaatgtataaatatttcagtatgtatctctaaaagataaggactcttctatttttaaatatatccataacatgtttgacacacataaaaattaatgataaccccttaatattattattcattatctaatccatgatcagatttcctacatttgtaactgtttgaatcaggatctgaataaaattcacaaccattttgattggttgctatatttcctaatgctattttaagtgttgatattcgaatttttctccttttttcactctttgtttgattctagccctagctccctttgtctcttttttctacgtttaacttttttttaaagaaaccaggttgtttgtcctgtaaagttctctgggttttattgcatcccctcttgatgccacttaatttagtccctgttggttacatgtatgtggatgtttgattaaattcaggtttgatttttaaagataatactgaatagttttacaaaaattgactttctaatttcatcaaaggttgattcggtatccattgaaatgaccatatgacttttatttgttgatgtgccatgatgtttttttttaaatttgttgaataagataatgaatttaccttatgatttctctcttttgacctttcagctactttcatttctaagtgggctttagttggtgaataaattaacatgtcattaaatgtcacatggtaatttcagtagcttgttgaataactgaatccttgattcttgttggatgttcagtcctctttgttttgatttgttttgcttggtacgaaagatttgactagtttggaaagtgacaggttaacattttctacattgacttgaccttcttccacccaaaatgatcctggtagaaaatgcagagtatagtaaagaatgtgtgccttccacatttagcctggtgaggtctataaatatatcaaattaagccagtcagatggcctgctgatatttgctttgcaggctagacggattgtactcctttagaatctaagtattgatggaaaaagattcaagggacagcttgaaagtttgtggactccggctatggaaattttatactcatataaaactgtcagtgattagtagaaaatatgtagcagaactgtgtttctggaattggcttctcagctaagaaaagattattggctttgtgaagaagaaaatgtagctttcttgtaactccatttagtcaattatccactatgggaagatacttttcttcttctttggaaaagctatgacatcctccatggtattcgtatcattgagatgtttctcctgagaaatagtagacttaggatgattagactgtgccatgagtaaaatgcactgtctgaaaaaaacagaaaaaaaacagcaacttgtaggtttgaaaaataacctttcctggcaatcttattattctaaggataacactgtctaatgacaccaaatcatttgctcagccactgctgggaacttagaatctgctttctgtttagctacaaatgagatcagtgttacaacaaaaattataattttgttttatcaggagaaacacccaaaggtcacttttcattctgctgaataggaagaaatgatatcagggtctgcccagaaagcttgtaagggagaaaggaatcttacccacttaggaagcattttctaattcacttatgtgaccttgggcagccttcccctgtgcacttttgtgaattcttagctagaggtattttactaaagactgcagaactattcttttgagatgatctgtatcctcctttaaaatataggataaactataaaatgtgctaagatccttgatagtcctatcattctatatatgtttgaacaatgccaaagcccaagttcatcagttaaaccagttaatctccattggcccttggtgtcaacttgttctttggacaaagtgtcaccttgtaggaagtctacaaacctctaagtgctcccagcgtattagctaagtcctgagctccatggagttggatgccctaattctgctttagaaagtcctagttccattaaccgtctcctgagaattctcctggcttccctttttgtttcttgagcagagttcagtcaaggagaggtcaagagagatgatacattacttccagtcactgtattggctctgggaacctccaactctatgcaggttctttgatctcctctggccactttctttctttttcaagtacatatttgctattcagcaaaggattgaatgacttctcaggaaaaaatgccaacccagaatgacaaggcttccgtggttctgagcctggctctgaacctttcctttggaaaactaatgactccacctatcattcccttggcatctagagaagctacattaggtggcacagctctttctgctcagcttctgctccagagcttcatcttcaggaaccacctaagcatttttttccccagtaggagttcagtctgctcattatacctaattgcaaaggagctatattcagagcaagaataataatttcagattttttaactggacttcaaagagcaggaaagtatgcagattcctaaacacataagcattgaagatattacaggtaaggttaaaaaaaatctgtaattttgtagtgactagcagtttaatattcaaacatttaaaatgtgcatattttattaagcaaatggcgtagagttatttggtttaattttctgtaagtaactcgtaaagaattgtcctaaaagctgtgggtgaggactaattcattcaagggaaacaggatctaatgattgctttgtgaggtatatatacactgtatactcatgctaattcctgctaattgtcaaagaagaatagtggctttttatcagcagtttgcatttgtgtaatggtcctggtctactggttttgtctacttcactgataaggaaaacaccacttaaaacaagcaagaaaagcaagccatcctttacagtattattttctttttagcctgtcttgagaagaaaaaaacctagccttctacaggaaatactgtttgattccatgggaaaatatttagtaacaagcagagaacacttgattatttctcagctatttattctgagtatttacaaaatgggcaatagtattatttccaaaatcttaagttgtaaacgaagtttatattacagtctacatgctatggatatgacactattttaaaatattttatactttaaaaaattgttataacacataatacataatattgtaagtaagtttaattcttgtaatttggaaattcagtcagaaatattaaagaattatgtagatcttgaaagggtaaaataatcctgcatttatgatattaatttctcttaaattgttcaattttattttataaggaaattaagtggttatacatttttgacaagtagttttgataaagttaaacacagattattgatatttacttaatgctttataatcactcaatgattgtcactccaaattaggccatcttttttcacattttgcagaagaataatttcctaagaaacaactattgaggcttggttatatatgtaacatttcagtctgggcagaatttctttttttacttttgtttgctcaatatttatgtcattagtaatagtaacagtatcatatatttgtgtgcagtgttgcaactgacaaagtgttttaataaacttggcaacaaccctttggtatccatttttgcagctgaattttctaagacaggtagatagagagaagtcccacagctaataattggaaaattgtgccttggacctgattcttcccagccaacttcagtgttcatttcagtacattttatctatgaagggtttcttctagggagagttggtcatggtcttacaatttttaaccccagtgattttggttgttatcattatgtcttgcacataataaacagtcactaaagaattgtgggtcaggcgtggtggctcacgcctgtaatcccagcaatttgggaggctgaggtgggtggatcacgaggccaagagatggaaaccatcctggccaacatggtgaaaccccctctctactaaaatgccaaaaaaaaaaattagccgggtgtggtggcgcatggctgtagtaccagctagctactcaggaggctgaggcaggagaattgcttgaacctgggaggcagaggttgcagtgagccaagtttgtgccactgcactccagcctggcaacagagctagactccatctcaaaaaaaaaaaaaaaaaaaaaaaaaaaaaacaattgtggaaggaggtgaggaaggaaggacggaaataaggaaggagggaaagaaggaaggaaggaaagaaagaagggagggaggggcaggctgaaaggaagaaagaagaagggcatgaaggaaggagggagtccttttgtgtggtaaaggatttttggaacctctaaatgataatagtagtcccccagttctcagctatttcagagaactgtccagcttccccagcaatgatcatttgtcctgaccttttttgccaaggcaaaccaggtctagagtaaaatactacaaaatacattctctggtattaaaaaggaatggccaaaaccgtaattacttttgcaccaacctaatagtaagtttctgctttaccttatactttcttccttataatactgtagttgttgacataccaaggaaagtgtgtttgggataaagtggtcacataaatggcaaacatcaaagtaatgtcagattttgtagtgtttctaattgctgttcattttgtagtcactagaagacaacttacaaattgtgaaaaactagtcataaatcagagggagacaaggtttagtgagatccagttcacctccttcctggaacaactattggggggtatcatcttttatatattgaaacatattttatcttccaaatctttagtttacctttaatacaactcctcccagcccccccagaaagaatgctgtttgctctgattggcataggaccggctttgtcggtttcattacatcctggttgaattaccaaatggaaactgatttaggaatactgagtgtgtacggcacagagaaaaaatatcactgcgaaatttataggcctgtgtaagactgtcagggccctgtgttcaaataaagagagcaaaaggaaacctggcgaaaatcaccatctccatcccggcttcttccgacaattacaacttattcctgtgcttggctgctggtttggagcagctgcatccactcaggtaacacttcgcatcacctgggagctcattgttgccttacaattcgtgatcattttttgatctcactactgctaaaggataaaagtgctaagcataataatccataactgtatgagatacttgctacttcatttccctccaagaatcattttgctatgaaatatcccattactagtttcaggtaatgatctaagaattttttaaatgactatgtcagagctaggggcttcaggatagcattacaaggataatcatttcagagagttatatttttaaggccttttaaaaagagggttgtttctagtttttaacatatttgttaatcttattttgatgatctcataaaatcagagtctaaggaagagatgtgtctatgtgttgcttatgtcactgcttttttttattgtttacattttataaggagtgtctacatttgggggggagttggaatgttggttttgttgtttttagcaaaagccttggcatttgtcctgagagagctcatgcagtgtttgctgttcaggttgcatgaagggcaatctttagcaacctgtcagagatgcaaaggccactagggtctgcttgaggttcagagttcctctgcaggactgcgtggtgacagcacaccacaggtggcccattcagcactgtcatctgggacagcaaggataccctgctccatttgtcatcctatggaattctgtcagcagttgaaagcctttcagcacaaaacctttaacattcgaggcaaacttcctaatttttttttttttttttttttttttttttgagacagagtttctctctgtcacccaggcttcagtgcggcagtgcaatctcggctcactgcaaccaccacctcccaggttcaagcgattctcctgcctcaacctcctgagtagttgggattacaggggcacgccaccatgcttagctaatttttgtatttttagtagagacggggtttcaccatgttggtcaggctggtcgcaaactcctgacctcatgatcctcccatctcggcctcccaaagtgctgggattacaggcgtgatccaccgtacccagcccatttcctgatatttttaaaggcaattgccgtggatgaaaatattaatacatagcacctaaataagtagttttttacatgaaaggatattatgttaagattatatgctgtgtgatatatagaaatgttgtatactccatgattttacagaccaaacaatgcaaatcatgtttcccctcttcttaatgaagatgttaaagtataactgataattgatggtaaaaatcacctgtctactcattctttcttattccttttgtttagtttgtttgctttgtaagcctggaaaagatgccttgaaatgtattttgaaaatagctttttgttggagtaataaaaaattagtccaattcttatttatccatagtaatgattccagaataacatgcacatccttaggaataaagttctcctttaaaaaaataaataaatagcatacatctttgaagtccccagatttccattgtcaagatttttctctcttatacatacccaaattaagagccttccctgcttgcccattaatatttgctattattcattgaatgccaatttttttttgccaattcctttatctagattatttataacctctacagaattctgtaagagtgccattacccctcttttcttaatgggaatattgagcatctgagtggttaaatgacttattcaaagccagtaggagacaagacttgaaccacatctgtctccaaatccaagttgttttgagtgtcttttgctgttattcgaaaaagccatgctgagatcaatgaaaggggtccaaaaacatgccttagacaggataataagaggtaagcaaggccatgagtaattcagaaatggaataatcagatattgagtattccagtcagatagaataaaaatcaagcaggggagaagacaaaattaggttatgtgtcacaacaaaatgtagactttcgaaggaaatgaacaggaaaggcagaagaaaatggaaaagtaatacatggcaggtcaaataaaagtaaacaaggtcatatgaaactcacatgcaaataataaagtagaaactagtaaggaagacagaaaggaattaaaaaggaattaaaaattcataagaatgttatcagtagacaagacaaaaaattgcctctaaagatggatttttttttttttcctaaaagagtatatagaatctgtactggcttgatatactggttttgcttttcatcctgaaaatatcattgataaacattgtgtatattagactatttttggttgggactgagtattgcccatggtgttcccaatgatatgagaagaaacatcctggtactaaatgccctggtggcctggggctgagagctttggctttgtataattcatgcacccactttcatgtaacatgaagtttgacaagtgaatattaagttcattatatgaaggtgttgcaaaccaaacttgaaacttatttctacctctcattctaaatggagatattttgtagtgctttagtctacatttacagtgatattagactctttccatttccttaaaagtatgatggcgtttggacattcaaccatgttcctctaagaaattagagtagaaaagaaatttagaagagaatggcttctaatctgcatgttgatatgtatctgactaataatctataatgttttcatttggaacaaataagccaacttgtgtttctttttcaatatatacatcatgtctaaaaaatgtaaagtcaataggcatgtaaaacatttcaaaaataaataattttatcaattgattgccattaaaaatagatgtctaaattgagctgcactgacatgactttataccattaccttgaaccttcctgagaaatgtattttgcttaatgacaatagagcttctcttttccaactacctggaagataaaatattggttaaaaaatgttgagcctcttttcctatttagttatagtaaaattagttaactctataattctctcttttataatttgattctatgtagtgagaccacaaacagcttaacttctctgctattgtttgtaaggtctgcaagtttagtgaaatctgtaccttatatgaactcttccttttaggataatttaagattaaaggctgcttagaagggggaaaaaaagtccatgttaacctttctcctttctctcctcttcagctacatctacatccaccactgggacaagccatcttgtaaaatgtgcggagaaggagaaaactttctgtgtgaatggaggggagtgcttcatggtgaaagacctttcaaacccctcgagatacttgtgcaagtaagaaaagaaatcctgtgtgtcgcttatgtctataactccttgtttcagatgattctatgtctcatgatgtattgttgctttttttccaattttgttgcatcatgttgaataatgctgttttatatgtagagtgttttaaaacattcacaccattcgtcatcactcctctgtcatatgcagaattgttttttgctcttttcaatgtgtgtgaggtgttttttgtttttgtttttgttttttgccatgttatttatagtgttgctttccttgtggtttttcttgttgttattcagaaaagatgtgcagatatcacagaggcctataacttttggtatctacttctacatccaatgtatgaattaagctgtaagataatgttgctttcttatcccagtgatcacctgccaaatgaataagacaacaaagagaagcagaagggcagaagattatttactgacatatatctattacacttgggattgtcttactgttgcataactattttttaaacggagtttagttttatattgctagtaaaaaaagagaaaaaagtaaattgcatatatttggaaatacattgtatgtagcatccctgtgggtgacagcagtgttctttcatttgtctatagatatatctagaatagcactgtctttccaatgacctgaaggagttgatgcaccattaagaagtatccaatttaggcctgggcacagtggctcacgcctgtaatcccagcactttgggaggccgaggcgggcagatcacgaggtcaggagattgagaccatcctggctaacaccgtgaaaccccgtctctactaaaaatgcaaaaaaaaattagctgggcgtggtggcacacgcctgtagtcccagctactcgggaggctgaggcaggagaatggcgtgaacctgggaggtggagcttgcagtgagccgagattgcaccactgcactccagcctgggtgacagagcgagactccgtcccaaaaaataaaaaaaataataaaaataaagaagtatccaatttattctctctcaacaggcagcgtaagatagtgatagtatcagtacattaaatatttaaaccttgtagtaaaaactaataggactcattaaaaagtatgtttattttgccatgcattttaagtttactgttgatatttagtctacatatggtatatggacttaaaatttgatgtgggcataaaaatatatttaatattttattgaaatgatgaaaatacacctttgttttcctctttaccaacagctatatcccaaaagcaaggtattttaaaagtcgttccttaaaaaatgtaatgtagaacatctaataaattttgccagcagtccccagcgaaaacatgcagtggggacattattctaaagcagcaatgcttgttctaaaggagggaaaaccattttgtcacaaaaactgttttctgctagaatattggcgtgtgacttaaatcttgacaaggaagaacaagtctgttagagaggcaattgaactgataggagcaattagcaaaatgaaaaaggcaccagaaatagtcaacaaagccatgtcccttttacatcacagaaatactatataaatatttaggtgccaattctaataaaatcttaattatatttataagtaaggaagtgcatcttaaaaaacatatgttttaaagacaaaaaaagcaacgatcgaaaatgccattttgtaggccatgttttgctgctctctgagctgtggtagattgggcgtgtctgtagcgtgcctgatgggacctcatggctctgaacaagcaccttccagaacttctcctttgttgcactctaaagctcttctttgaaaaaagtagatacagtgccaagacaagtgttggtggttgtatagctgattttatcaaagacagacaatttgtaaaagtaaatgtaatctgttagagtgaataaaagacttagagccagaacagtaaaattctaatctcaattactaaacatctctttcacggaaataaataatttttataagccaaagtgaaatgataggtaaaagtcttgcaaaaaatattaaagcaagatgaaatacgagtatgaggccaggtgcatgcctgtaatctcaacactttaagaggccgaggcagacggatctcttgagcccaggagttggagaccaacctggacaatgtagcaaaacaccattgctacaaaaaatacagaaaaataattagccgggcatggtggcatgcacctgtagtcccaactattcgggaggctaaggtggggggatcacttgagcccggaaggttgagcctgcagtgagccaagatcatgccactgcagtccagcctgggtgacagagtaaggctgtcaaaataaataaataaatagaataaaaaattaaaaaaagagtatgtagaaaagatcattccttttagatctgaattatctcatacgactatgtttattgtttaaaaaataatcttagagattcacttcttggtcactaaaatattcaaatctatatgcttgcagcagaataaaaatctgtctgatttagtctttagttctgctgacttgctgtgaatacagcacaaatatgagacatccccatatttatcatagcaaattgggatgaaccaggtttttagtttgtaaggttttctctgatcaaaatagaaaatgccagaagctgagaattgtaatctataaaatatgaggttcatttgttatatggggaaaccttgttattttttcctaatcttaagcatacagtgtaattgtattttaataaatctccttgaaaaagcatttaaattataggtccttaaattcttctcctttttaaacagtgtacccatattatctatgtctcatatttttacttcttcagaaaagcatctgagaccactatattttaattatagtaatgaaatatgatcatttttcatcatcacttagcaaagatttacaagctgagtgagtgcatatgatagtttctgcatacctctaaggaaccagggcagttcttttccacatattaatttcagctattctttagccctcccacgtccaatacaaaacatgcaatcgcgtaagtgctgttcagttttttcattttaatattgtgccaacaactgcaatttttcttcactcaacacagtttctcattaaatcttaagcctaatccagtagtaaaaacgtgctatattttaaaaatcttgaagtgaaacatttgttactcttctgataattattaaagccccaagccatcctctgagctaattgtctagtggatcattcttgccttctagttctaagaaattacaccttttttttttttgtaattaggatcttttaggtaagttatttaaattattactggatcttatcagaaagaaaatctttgacatctatgattttgataacttccccctcctttgagatggtgactttattcacatattaaagcaagccagaaccttgagggaagaattggagagtatattttacatccaaaatacttcaaacctttctcgttacatgaaactgtttttatttttttaaatcctgtatgtaaaatatgtatagcattaaaaataatcactagtcagaatttaaacaaagacataatatactaggtcttatgataatacattgttcactagaccacttgaatagaaacagaagacataaaaatattgcattggctcatcatggtcctgtctatgaagccagttcatagtttccatatggtctatctgtctagagctaagcattgctgaagcatgagccacatcattgaaaatcagctttatccctgactaaagacatgactcagaaacaccacaagcatggaagtttccaagtagtctctctggtcacctaatctgctgttgtcttcttgggagttgaagtagaagatgttacagcaaatctcttttgtctctctgcttagaacaaggtgtttcgaatggattaaacatattaacagtgaaaaacttctctgaggagaggtttccggattgcttggacctcctcctggggactgtgtgggaatttcagtggtagttctcatcttttatattttgtttctctacagtaatttaaaatttattctgtggaaaaaatagttactattccagattataaaaagatgagaaaagaatcattccattttgtaccctctgatgctttatgtagtcctgtggttcaaagaaacaagacacatgaaatcaaacatgaaattgtccagatttcctcttgcatcttttctctattcttgtgtatctgttcttctgaacagtttcagtggagaactactttggaagatgttgatgtgattttttttaatctaaaaattattttatatcaggctgtgcttataagtccaacatgttgtccagtggacagatgtgccttcatctggaggggattagagttttaaactaccaattttggtgaacagtcttatgtcctttcacttcaactctctggacaatatatttatttataacatgaagttaatatgttctccaaatttcttcccagggagtcagtgaaattaaatgagttcatttctgctaaagtacttttaactctggggaagcaaaatttatttttccttataataaaaagtaaatggtagtattacattctctcagtagacattggaaaaatatatacacctgttttaacagactgtgttatcatgtttaatttctttttttttttttttttttttttgagatggagtttcatgctcttgttgcccaggctggagtgcaatggtgcagtctcagctcactgaaacctctgcctcccaggttcaagcgattctcctgcttcagcctcccaagtagctgggattacagacatgcaccaccatgcccagctgattttttgtatttagtagcgacagggtttcaccacgttggtcaggctggcctcaaactcctgacttcaggtgatccacctgccttggcctcccaaagtgctgggattacaggcatgagccaccatgcctggcccatgtttaatttctaattctttattttacttaagagtagcagttttatttggtttgttgggaccaccaactatctttataacttttctttgacagatcgtttaatatttctgatcattagtttccttataatgcaaaaacaacaaaaaacaaactaaatttggaaagatggaaggtatctgtaaacatagacttttataattttgtataatgaatgtttatgaagccatgtagggccttattatattatacattattataagagacaggtatgaaaaacataactatgggagacaaaatcacagcaaatataatactttaagtttgatagataaaatatttatcaaacgtatttgataatatatataatgtaaatgaaatatttatcaaattatgcctgaggtcgcaatttttttaatttttgcaatcagaccttggcaatgaccttgagcagtagggtattaaaatcttccacaggcttagcgtcccaataatggaacactaagcataaatggattaacatttgtttatagaacagctatttgccaggcactttttaaaacacagagaaaatataaggaatggtgtctgatctctgggaactcagtctgttaaagaaaatgaaattgctaaaatagaaaatcaatgagtgaatatatgccaaatggtacaatgctgactattaaggtaatacaaatttaaagaagggaaagaaaagactgaaataagttagagaagactttttaaatataatcatcatttatagagtctttcctttataccaggaaggcattgtggttgtaggaattctttctctgagacacggtaacatgcagcttaattctaggaagtaaaacaaacaaatgaacaaaataaaagaactaagttaaacagtggagccacttaatgacctctgaaggtcaggcagaggactttgggtattgtaatagctaacagggagccatagtaacatctggagcagaagagtggcaccatagacatagcagatgtttagggaagcgagtcttccttacaggctagaagaagtctggggactaagtaagatggaaagagaaagtcaaagacatcaaaggcactagctaaggttaacattttataaaatactgacataatgatgctgatgatagtaacttttataatatgtattagtagctgaattaatataattaaacaagggggcaacggtacaaactcacagttgtgtcctgcagtctcatcatcatggctgcagaaagagaaatttggaaaaaataaacaggactgggttagaacttccagtctataagaacacacttttgttgtatttgtagtatttgttgtatttgtagtattgctgctaacaccaataccagcctagaagagttctttctttagaatcagtgttacacttgcctgtggtacttctctgttcttgaatattgtaacatttaacagatatagacagcatttgtgagagcaagtggtgggactcatgtggatctagatagtgcgctcttcagacgactgtgtcctctatttctttcatgtcctcatatatctagaatcctactatgtgcttatgaggaatttattaactcatttagacttttaactcactgaagtagggttgaagaaaattctttagtttttataggattcagtttaggtgtagttttacctaaaatcaggtgcattgtctaagtgttctgaatagcttcattcctcacttataaaaatcagttgagcagccatgtacatttattgaactcatatgagacaggctctgtgctcatgctacagacaaagtagtgaacaaaaccatactggtctttgcctgatggagtctgtaggctactgcaagtaacaatcatgtttcatgtaattaattgaattataaatcacaggtttgccaagtgctatgaaggatattaattgagctaagggaatgtacaatgaaagacctagtcagaggctgactctgctctgtggaaaaaagaataaaaaaagagtatgcagtcatactcttcagatgtatatagagtcaatttaaaatatttcattgtgtatatataccacattttcttaatccattcatctgttggtgaacacttaagttgattttataagttggctattgtgaatagtagatttttttataacttggctattgtgaatagtggattttataacttggctattgtgaatagtggatgaatattttagctagattgatttaattattcaacgttgtattcataaatcataacatcattttctaccccataaatgtatacaagtacaaattgtcaatttacaggaaaacgaatacacaattttgaaatatttatattgaatgatttaaggaaaaagtgaatatttagatgttttatcacagaatgaggctggtgaagtggataaggctataaagcccctcagaacccctaagctgtttgacgagacagggaaacttcctcaagagaggaaaaccaaaccacaaattagcagtcgatatgtcattgtgtcacaatgacgtggagatgtatgggatgtagattgatcccacatccaatgaaattgtttgacccccaacttaaggattcatcatgtagagtaaacatgggcaagggttttagtctttctgcagatgagcatttcagagcaagctgtgcaaacagagatttaggaagggcaccaaggttcaaacaagaagttaattcacaaacaccgccaccctcattattgggattatatgtcctggacattgaaaaacaacatttgaaaaggcaggacaagttaggtttggtttggttttgtttttttctcagcatttacccatgagtctagtgtggccactctatgtatcctcttatctcatggattggaaactagtccccagattgtcattaaaaaaaaaatggaggatatatactgtctgaacagtggtggtgagatataggttggatctgaaggaaacattactggaacattttatatttaatattttctttaatgatgttaaagaaggcattcccttggggaaataaatgtcttttgcagatgatgctagaaagaacgctaaaacacaaattagaaaagcatatgcaaacctcaagaaacttcacttaaaggtagataacagaatgaggttcatcttggaaaaatgcagactaatagtaacaatacctttgggaaagaataatctacaacacagatactcagccagtgagtgggcgagttctgggcagaatgctgagctggctaagaggtgagaaaagtcaatgtttgcaacacgatactgtaggaaaacagaccagcatagttggagctggcgtagacactgccacctcgagtttacacagagagagagcaaaggctttggtgtctgatactttctcaccaatattccttgatagagatttgttgatatttctatcatttaatatttgtaaacataggcatcaaataatttcaaataccacagctagtattgaggaaaagcagacagataatagggacttttcatttttcgacaaggtattttttaaattgtccaaatatttcactgtggaatgatgactagagagagaggaaatatcagctgtatttttttttcttcctcttgttcctgatcaagggagggtttgatgaaaatgaagctgagaagagaaaggatgtctaaggatggtttataaattgaccataaatgtgtggtttataaaattagccaaccctaactagaagtttcttggggtccgtgaatatctataaaaacgtctagaatctccaccaagaaaaaatggaaaataatttattcaattggaatataaaaaatacaccaagcattaagtttatttcaaaatacatacatctatgattgattacatagtaagcatatcaggatattaacagtatattgaagttattattaaccacagtttttattatactggtgctgggcagaagtttggttagtagaatgcactgctttattgaatctgaagtaaactggtatttcactaatagtatttaaattcaagataacagacttacttttaaagaatcaaagaatcttttccaaattgcaaacatgatgttaaaggattttattggagggagggagactgtgagaaggatactgggaatttctgtaaaaattatttgagggcaggcacagcagctcatgcctgtaatcccagcactttgcgaggccaaggcgggtggatcacctgaggttcaggagtttgagaccagcctgaccaacatggcaaaaccccgtctctactgaaaatacaaaaattagctgggcatggtggtgcatgcctgtaatctcagctacttgggagactgaggcaggagaattgcttgaatctgggaggtagagattgcaatgagctgagatcttgccactgtactccagcctgggtgacagagcgagactccgtctcaaaaaataaaaaaaaaattatctgggagtccacagaggagagtgtatcataaactataaaaataacagacagatgttcaagattgacctgtgcttgcaaatcaattaactgtatgacaatcttcctttttttttttttttttttgagatggagtctcgttctgtcacccaggctggtatgtagtgttgtggtctctgctcactacaacctccgccttctgggttcaagcgattctcctgcctcagcctcccaagtagctgggattacaggcgcccaccaccacgcccaaccagtttttttatttttgatagagccattcaccatgttggccaggcttgtcctgaactcctggcctcaagtgatcagcccaccttggcttcccaaagtgctgggattacgggtcttagccaccacacctggcctgaaagtctcctttgatacaattgtggatcagatacggacgctgtggtctgatcttaagttcattttcacggacattttgtgagagcctattatgagccaggcattgtgctaggcattagagatacaaaatgatcagaatgtgatcattgtctgacagaatgtgatcagtgtgtcacagatcatcacaatacagataagtgcagtgaaagaggtcaggatagggtgcaatacaaaaggcaaggagagaattctccccagagcatagaagtgggtgatggggaggtggaggacagggaaagagtgatgcctaagttcagaaaaaactgtgaattttcaccccattaataacaaatatagaacaaacatgatcatgttaagagcaaatactaaaatttttaaaaaccctgatttccatcttctaatctgattaatgaaacgaatggtatatacatacacacacacacacacacacatatgtatatatatttaaagctacaacaagtacttgttattcagatccttagattgttctcagacataaaattcttggaatttgctcaaactcatgccaaagcttatttttcaaactcaggtttgatttactgttattcttatcttccaggaaagtgatggattgaatgtttaacatacaatgttgataatagaaatgtatcagaagccagtctccctagtctgttagaagtaattccacagaatttcacagagcttatagatcaactgggttttcatttgcatgtgctttctctacacaatcaatgcagtgtgcagtttgcatatgcagaaactatctcagtttctgcttttcccttccatctcatttggcaacaaatttagatgtctctgaaggctacatccttttgttgctgaacacttgagttgcttgggcacttgcagtttgttttacctcaacgattgtcttaaaaatccattttatcaagaaggatttttagaagtcattgagttctgtcgtccctgactggtaatgcattcagaagaaatgatgttggggttttctagcagtgattccatgtgttagaataagtatcatttcccagaaccttagtgggaaaagaggtctttgataatcacttaattacattccttcattttatcactgaggaaaatgagaccccgtaaagcaaaatagcgtgtccatgtgcaaacagcaagataccacagtgccgagagagggcgtttgcctcccttttcccagttcagggcaccttacgtcttgaactttaatctacatccacatctcttagggatcttgttaaaatgaagcttcttattccatagttctcggctgtggcctgcgtttacactagcacactcctaggaaatgctgatgctgtcagttctaagtaataacagggtcttataacactaagaaacaatgctgagaaaattcatctcccaaatgaagacaaacactagcaaaaggatagttctggttgagaggtagctgctatttccaaaaaatgactttcatacctcaagtagttctggtgttagtgcacccagttttccgtatgattttatgatagagataagccatcatcttatgctagcttcctaggaaacatcatgttagaaattcatagcagttagaaaattgattgggtaggatttctgactccctttacctagttgtcttgtgccttctgatcacagaactggttataagatgcctaatgacaatttccttataaatgccttccttctcttaaggaactcgtgattccttagctatttgttaatttaatgattcttactaacgtaagggcatttcctgccttgagcaattgtgtggtgtgtgtgtgtgtctctcttacacatacacagcgtgttcacatatcttatactatgttcttttgtaagaaacaaatggattatttgtgctcagtatgagaattttaacttttatcaagaattcaaagaagcaggatggaatgataattactgaatacatcattaattctggaaacacctgctttaattatagggtttgtctatatgaacttatagtcctggtagagaaacaaataaaaaccctatttacttcagaaataattttgtcaaataagttatatgaaaaaagttcccatgtgttttttcttatatacgttcagtaagaatgtgaagacattcttattgaagcatatgaaatggcgtctttttgagaaatgacccaacctcttttttttttttttttttttttgagacagagtcttgctcttgtctcccaggctggagtgcaatggcacgatctcagcttactgcaacctctgcctcccgggttcaagtgattctcctgcctcagcctcctgagtagctgggattacaggcgcccgccaccacacccagctatttttcatatttttagtagagacagggtttcgccatgttggccaggctggtctcaaacacctgaccttgttgtgatcttcccacctcagcctcccaaagtgctaggattacaggcatgagccactgcgcccggccaagcttatacttcttattgacatgtttctcaaggtagctcttcctctattccctgcagcaaaaatattctaaacaaaaataatccgtttacttatatgaaggtgtttccaagagtttgaaagagctgtgtcaatataagatgtttgttgtttaagcttaaacacatactcacagggcaaaaaatctgaaactgctagtattttatcgcgcaggctattttcataaagtaggagaattacatataccaagtcacttggtgaattggtttgaagggaaatgaaattacccctatattggtaacaaggaacagttttgttcatatctctttgatgccaaaaatatagtatgtattcttatttactctgtagtgaaaagggttgtgtaaaaatcactagggatgagctaccagagctaacttggataggctctttgcttgatggttgctgtatagatgaactattaataataattatgatgatggatgttgaggattcaaaatgatggtctttctatctgtaagtatattgcttcctagaacctttcagtggccctttttattagaggatatactggtaaaatcaatcctacttaaaatgctttagttattagagtaacagcaacagcaacaacaaaaaagtggtaattataaagagcttccatatttaagcacagccccattgcatgaccttaagaacaatattatatcaagattctagaattttgatagttaaatatatgtgagtgaataacatgaaaaatgttatacagttttaaaaatagtttttccttaaatgcaaaatgacatgtattaagtaattctgcataagaataactgatctaaattttaaaatgtatttgtctttgatttgggataatgcaattaagtgaaatttgtcttgataaaaatctgcttctagtatctttgaacattaaaaacaagagtttatttgtaatgtctttttaaaaaacagggaatgtagtttttcttgtcaataatcattatagtgtgaaagtacttgacttctattgtttaatgacttaacttgtaacataaaacacccatgaaataaatacacaattgaaataagtatataaaagaaaaagctcaagatcatttattgataagagacagggatggaatcatgttagcgcttatcaaaaccagtgtttcaacatagtgagaatcaatgatcagtggcaaatagggtcatgccaaagggaaattgacagctctccgggccatgctgcctcttattccacatttcaacttcactctagttaaatttcagttaaccaatcatttgaagactgaagcaaacaacaacaaaaatctgtaacccacagttttcgtgggacatggttttctaaatgttgtgtcttttcttttctttatattgcttggtaccagatcatttttaggaatctccatattccataggaggaaaattgccagtctgaaagctcagtgtctttagcattttttttttgcttaccacatttttgccctctaggtgccaacctggattcactggagcaagatgtactgagaatgtgcccatgaaagtccaaaaccaagaaagtatgtcaaaataatctgaaatttgctttctcccccaactacagcaacaatcactaccacttggtgcttttacagctcagtcgtaactgattcattttgttctaattatggcttaacctctcaaggcataaacccattcagtgttaccttatttaactgtctctcaaagtgggtccctaagtcatcaatttacaagaatggccagtcacgatggcccgtgatgctgacaaactattgcaggcaagccaaccgagaaacattttcttccaacgtgtgtgaccaaagccatcatatggaaaactgagatgaataaaacatcggatttcattttaaggggttccctttgaaagaaggcaaccacttaaagtgctgggatctttccaccataccaacttaagaactgcattctgtccaaatttttaaccatttgggggaagtgccagagcctgaaagccatgatcagggcaaagattcagttcctgagggtgaactcaccaagtttcagtcaaatgacactgaaggagcttctttctagcatatattcacctcttctctttttctctgtttttctaccattgtttttttgtttcttctctcaggtgcccaaatgagtttactggtgatcgctgccaaaactacgtaatggccagcttctacagtacgtccactccctttctgtctctgcctgaataggagcatgctcagttggtgctgctttcttgttgctgcatctcccctcagattccacctagagctagatgtgtcttaccagatctaatattgactgcctctgcctgtcgcatgagaacattaacaaaagcaattgtattacttcctctgttcgcgactagttggctctgagatactaataggtgtgtgaggctccggatgtttctggaattgatattgaatgatgtgatacaaattgatagtcaatatcaagcagtgaaatatgataataaaggcatttcaaagtctcacttttattgataaaataaaaatcattctactgaacagtccatcttctttatacaatgaccacatcctgaaaagggtgttgctaagctgtaaccgatatgcacttgaaatgatggtaagttaattttgattcagaatgtgttatttgtcacaaataaacataataaaaggagttcagatgtttttcttcattaaccaaacagtttgcattgaggcatttttttaaaaaagcatcaagtaggaaaattaaaaacaaacatttcacagcaaatgagatatcctggcttctgtttacgttgcttagggaacaagtaattcaggcactagtttaaacaattatttatttatgttaccatttctttatgttagtttcaaaagtaacttagaataaaatagttactgttatttgtttaaatatttattttgagatataacaactcaactataggataaatatgtgtttgtatatatatatgtgtgtgcgtgtatatacatatatatataaaacttaaggcaaaacatatatatatatatatatatataaaacttaataacttaaggcaaaactgggaagtttggatagatgttcgtggcttcctgaagttttgaacatcattcctaaaagacccaattcacattgtacataattatataaaccaaaccatgtatttgtcctattgtgaactggacacatataacttctgatcctggagctttcaaaatattgcatttaaaatgcatatcatgtagttatccttgtagatgaaagaatggcaatttttttctgtaaaggttcagagagcaaatattttaggatttgtggtgacaccatcactgtcacaacaactcaaacctactattgtagcatgaaaacagctgtaaacaatgcataaaactgatgtgcatgggtgtgttccattaaatctttatttacaaaagcagacagtgggctggatttgtcaaccactgatttagattgtcaattgctcaccccgaaaaatatgtcacatagcttactgcagtttaaattcacctaacataagaaacagtgatgtaagttggttatttaggggtcctaaaagaatcagatttacccttgttctgatgcatgcagagaataagtttctgtaattcctgttaacatagaagtttccagaataaattctataatgtataatgttaagattagacccgtaatgtgcaatcatttatttagggaggtagtatttatttatttacataggctacatatcaaagacaacttcgtaggccattttctgttgtgaaaaattagtaaattggcattgcaaaatttccaaacagccttcactttattcacaaacatttaagtaatatgcatttagtagggagaatttttctatccacagctaaagcaaatagcttgatttaatttttaagttaattttttaaagctaggatagaaaataaaaataaaagggaaaaatagaatgttatttaataccttaaagcatttctcttagaaatgtgtatttgtatttaaataacatagactcagcaaatccatgtggctagataaatgcagtaaaatcatattttagactttaatgacaattctgatcacttaattaagttacacttacatttttggtgttaagagttttactgtgctttgaaggcaatgttcaggcactatataaataaaagcattaaaaatgaagctatttcccagcataattatgtagttagatctgacagtagtaaccagagaaaatattttcaacttctcttttagaccatttgctttttcagaagatatcattttaaaataaccactatgtttttgtgaagttcagagtgtgattccttaaataacttctttagtatgctttcaatgccacttttggacgacatccaggaaagcagcattcatatttaacctgatttaacaaagattgattgcacatttatgaacaatatatgtaatggctgtgcaacagagatgcctcatgtctggaaaagcaagagcttccaatcagaaattgctttccagtgttgtcttaccgagagttttttcaatttttatctctgcaaacccctacatagaagtcagaaaaataaatttgtgctgctctaagaactttatgttcaagtagcagtgaaagccagaataaagatagagaatgtcaccatagtgaccgttttaaaatttaattgtttgtagtcttaaagtctggaaaacataaattttgaacacaaactaggaaaagatagtccccagcttcaaagagaaacattcaaaacttaccaaactgcattttcagttgaaaaataacattctaaagaatagataattttttaagtttattaacataaaacttacattattcagacttgatacagtgattctggtcagaatgtccaatgagccatttactgatttataaaaactgacttaaaatatgaaagagagggacaaatgtatattttataaggcagtcatttgccttgaaataaaacattatatttatagtactttctaggaaaatattgtcaaggttagtcagcttcaaatttgacctaacttgacacagaattcctagttgaaaaaaattgtgttcatcgatatgtggtgtgtggggggtgtgtgtgtgttcgtgtgtgtgtccacacgtatgtgtgtgtatacaggcactccataatcaatgtacagattttagggaggaaaaaagaaaaagcacccacactttcaatagttaggggcagtacagagcaggtatgtcatatataaactaacataataggacctaattatagaatagctcaaatttagaatattttaaaagattgtaattttagaacttttaggaatattctcacactgagtaaatttagcagatatccttaaaagtagttttgaatcacaggttactagtgcatccatcatttgcatggatttctaaatgcaacctgttgaaattattcttgttcatcaaacatgtatcttgctaaaagtagaatagaggaacacttcacctgtgacaaaattgccataaattccagccaagtgttagtgagattttactgtgtgtgtgtttgtgagtgtgcttatgtgcacatggaatttgaaacttaaggagaaagtctccgttaacatttcaaagggcccagtgacactacggattggcatatgtgaaaaaaaacagtatctccattttataaaggtaagtctaaaattaaaagacagacactaaattggtcctgtttagaattggcattgacagaactcctttcgaaatctcagcggtacagaaagtcaagactttaagattttaagtctttgaaatgattagcataaacaggcccaagatgttaaagagaaaaatcctaaatgtcttcaaattttaacaggaaccacaattgcatggatatataatttttgtaaaagaaagttgttctattgttctttcctttaatgcaattgaaaatttaaattaacctacaggttaatcagttttcctcaagcaattataaaatcctaagacaaaggattcgtgagtcaatatttaatagtttctgaagacttttagatttaaattaattttttatattgctcagagcacagcaggaaatcacatgtagaaaaggaaactagattgtttacagtaaactttgtgtttttgaattattaatttaatttgaaaaatgtagtggctaggcagaagttcaataggaagcatgtgattcttaatgagtccaggccaacattagattaagtagaacagatagaaagtaataaccttttcataaaatgaaaagtgttcgtgtattctgctttttttttttttttttgacttacaatgaaagaaatgtagctaccaatagtaaaaatgaattagagcattatttgctctgggtctagtatgactgatgcatgttccctctgcttgtttccttgttagggcttatggccagaagagattccagttttaagtaccaatttcccattgaattatttgaaattggagctgcctgatatgaatgacttcccgtgaaatgaaattatagttaggctgacagacttacctataaaactgtaaatgcagtaatatgtatgcatgggcatgctactaattttattgaagacttaaccaagctttctatgcaactaatatagatcatgagcagtgttcatgtaggcatggagtcctgactctctggaaagagtttctgtagacatcgcttgattttaacccttaaattattactgactggtaggagaaaaaggcaagggaagggagggggctctagaaagaaaatctgggtcccaccttcatggaaatgagtaaggaaatttattattgacttccttggaaaatgaatgttttcacgtggatgttccaaagtttgtattaagaaagcaaatgggaaaaaaaatgaccaatttttgaccaattgagtgttgcacggaggcaagagaaatttatctggatttgaataaattattttgctgtgaatattgtgcaaccaagttaatcgtaactaaatcccctagcttttaatttatgaaaaatatagcttatttgcttgtgtacactggacccaaggcagaggaaattattatatatagtgcttcccattatccttgttatgcaatgtactttttgatatatgtgtttgtgtgcatatatgtgtgtgtgtatatatatatatatatatatatatactttaaaaaatctggggagctttatttccttaaagggcagcaagtttttaagttttcaagtatccccggagcttacagagtttttctggctagttaacgagaatacagtaaatggcccagggtacatctcttgatgtgtctgctacccaagctgttaaacccttctgctgtttgccaacatatttcacgtctcctttactccccaggcatgcccagtgaggcatgtgtttgcataagaaatattttgttaatgaaaaattaacatgtccaaagtcactaaaaagttccacggcagaggcaggacccaaaaccaagatgattccagcacactcatctcctgctttttccctctctatatgaggtactttttccatgcccaaatgcaagtttttgtaagagaaacacccctccacagcattttcttcacacttaagagataccttgccatatcattgaatagcccttgtatctctcgaggcagtgatcaaagaaagaaaatatagatctccattgatatgctgtctctccttccaacctgcttcttgaccacacacataggcgcatgtacacgcgcgcgcgcgcacacacacacacacacacagagagagagagagagagagagagagagagagagagagataaaggaagtcctagagccttccgcatcatgaaatttgattatcagttttggttttgagaatgaaaagtgtcatccctggagattttttattttttttatttttttggggggcttgttttcccccacttcctcaatggagcctctgcaggttctgctgttcttgcaatcctggagtctctggagtcccagctgccaggattgctggctcttggctcatacctttgagtccacttccctgggcagccctgcaggtcctccaagtggctgtgtgcatgggagtccagcattctggagaagtgatttcactggctctctgtgatttaaaggagtaataagatgaaaaaccctaggaattggatctttcccacttatttttttccttacagtttgaaaaaagtgaggcgtagaattgtcctatgccatacagaacttatatgagaaaaactagaaggagtctccagtgtcccaagcccctgtttggggttttggggcagaagcatttgttgctttctgtgaatgaaacagacaagtgatgaggaaagtggaagattagaagaagtaaaagagatacagctaagaaaataattagataaccaatgagcaagaagtatttgaggccagctacccacaatcaaaaatccaagtccaacctgataacattttcagaccaaattaccatcctcttggcttctgctcctgcctctgccaatgggtgtctttgggtaaaaattaattaattaattaatttaattaaataaaattcacctccttggaactttgcttctgccttttaaaaaaaggaatgaaatagtatcaaatgccttttctgattataaagataatctttccattcccacacaaggaaataatttaggggatagttcagcgacagaacttctccctcagtaaggtcttttaagggttaataaagacacagtgtgctggtattttgcacacctcataaaaagagacgttccctatgtgaactcacagaggcgtacctgagcactgcttcttaaccacacaccatttgtctggttcaatgtgcatgcacagagagccataatagtcatgtgtaatgtgttttggagtgcagtgtattgctcttttctgaaactttttccctttctttcttttttttgtcaactttctgcattggcagagcatcttgggattgaatttatgggtatggaccaatcatcattccttttagcctgcagaatttagagcctatgagctgaaatctttttcccttcctactcttacctttcagttcctaactaatttcctttttctttagaagggatcatacagctataacaatgatttctctgccttcaatctatgattagtttactgaaatgttactgagtgcagcaggttttagattcctaagcatccttcacttagagtttaaaagtaccctacctgctgcaaattcacatatatcccacgctgcttaacccactgattggatctagctctgctgttatataaaagctggggtaagtagtagtagcacataaaggatacaggggaaatccactcagagacctgagaacaaaggctttttaaatccatctgcttaaaaaacacacagcatcttagcctggtaggatttttggcatacaatgtaaaaatcatctatttaatataagcaatgtaatgtatatagaaagcccttacgttacaacacaatattaaatgcacagacttgaattactcagattttctggagatactcaagcaccaccctagtcaacttcattatcttataagaaggaaatagaaaacagaaagaaagcagccttgtgctattttaggtggagattccagtggtaatggaattaaatttgagtcatgaagattatccagacaagtaatcaaatagaaaatttcacactgtcaaagtaaaagaaaaatatatgagtatacaaaatttggacacacttttttgtaaggccttcatcctacatagttgggattgaagaccagtctctggggagtaaggagctgtgctaccttcccagagactccacagggccaggccagtcagtctttttcaatgctgcctgcagtcccggaccatggttgggtcagtgacacaatgtcctgattcacagaatatctggtccccatccagctggcttcagggacatcatgcagcaggggcatcctacagctgctgccttcttttggatgataacatcacaggctggacataatgtagtttccagactttgcgggaaatgaggcagttgcaagctctagcagctacagggattgctcaatgggttgcccatttcttcctcaaaaaaaaaaaaaaaaaaaatcaggagtaaactaccaatttgatgagaagcccccaggtgcacgtgaatgggcctttgtgcctcgcagaacatctccaaagagggagaaacacaagggggagcacctctattactagggagcacgttgtgtactgaggggagctatctattggagtttcttccctcagggaaaaaaaaaattgtcccacttatgaaatggattattggcctatcctgcagggagggaaaaaattctaccattaccccaaacccttctatccttaacagcatatttctcatttttatagctggagggtctgactatagaatgtattgtttctgtccccaacagtaaagtgaaagacagttgagatatataacttccccctcagtaagatcttctatgggttagaaaagacacagggggctgctatccgcatgcttctcaaaggtacagtttccagaggctcatagttccaggcttgccggtgtactaaaccagaacattgcatccttcaggaaaatcagaccttaaaggtcaagtacaactcagaaaggtaagggctctgtttcttggccaggccagatcagactgaaaaatgtgcttgatctggaaacatgttagtccagccaaaccatgaagactctggggcatttgtgctcattgagagacagacccaccgatcggaatgacagactcttgtttttagccctgtctgtctctaatttgctcttccccagttgacctgacacataagaaaaaaattaatatggggaaaaaagaggttaaagaatccattgtttgtattatttttcaccaagtatttttccttgatcacattcatagtgtgggatcacctgattgagccaaaccatgaaaaattcaaatagcaatgaggataagggttgtagtgcatctggtcaatgctgatgtgaatataagattttaatcccacgtctgtattctatgggccttcgcttgaatcagctcattctagtgctgttacattaccctttggcctttactgagctacctctttatttccatgaaatgatcattttactggaaaatgtgtgtcttcctacactgcatagaaagaatgcacccgtcatcatgcaccatatgtttccaaacgcagctcaatctattcttctgtaattaacaacaaccaaaagacaacttgtcccaagaatccctgagagtatgcatgattcctttttcccatttagcccttgtccatgtccccatttttgaagtctgcagaagcagtttcctagcttctttctaaagataggatgttaagatgtcagtagacaagaataaccacagacttgcccatcttcaaagaagaaaacaatagaggacggaaaagaggacaatcatacagggccttcatctcttgtcaataatacctacactcctatttcttcaccaactcatcacagcccagggagctgtgctctgcatcctgggtcccagggagagaaggaccagtggggtgacagctttgcttcttagacatgtatcctaaaacctgatcaggataccaagatcaggaagagaggctacagcagcagcttcaaccagataacaccccatagaaattaattccctgtcctgtggctatgggggaggggaggcagcagacatatgcaattaacatataagcactcacattccatgtcctcatctgacttttgctgcacacaaaatccgtgataccaactcaatatctcctggtacattgtttcaccgcaatgcaccagccgcttcgctttctaattgtggcttccacatgactgctagattaggagttatgctgtatggaatgacccttccaactttgcatccaccttttcttcccacccaagcatttcctccctctggttttcttttctttctttatttttcctcccttagtatcaggcatgctgtgccagggacttcagatggctccttaacttttaaccttgttttcccttcctcggtctctctgtcattctgtcagtctgtctgtcctcttggtttgtttttcctttccacctccaacccttttgatttgtttttgtatactctatgcagcattctagtcctttacccactgacttctcttttccttctcctcctgttaataatcagtgctatattaatttgatttgacaatgttcttgacctgtttactggaatttgattatcatgggctcggcttgtaggaaatgttttgtttcatgataaggtccactgtatcctagaaattaaaattcactttttcatttcaagaaaacttcctgcaagctgccctctctcaaaagagaaaaaggtgtagttaaaggtgtagttgtgccactgcagatataatatggaaatatgctttgaggttcccttgttgatgtccagaatagtcagctctgtttgtacagtattccccagttcttgaccaatttattgatcataatggcaagtgaacagcttacactgcttatttcataccagttgagttctctttctgagtgaacttgtgaagatcttccaataaatgtaattagactcactggaagctcaggtccttagggatcagagtccctattaaatcagcaaatcttgttaagaacctgacctaccttagtataatcaacttatcccccaaagaaactaactcgcaaatagaaaaacttctatgaattagagactgatcgcattttgggtgcagtagtatctttggttcaaagttctaagtgtcacatttccttagtataatctacattagctcatttgccaagttggccaacgtaggaatgtgcactctattccaaatcacacatcatttgtactggtgacttctttggacaaataaaacttgttcctaagtacaattggtggagtagttagaattgtcttccaaaggacaagtcaccatttgggcccataactgtcctacccatcacataggattttctttgatacagtgccctgctacctcatattgtattgcttcttgtgttcacattttactgttaaatcacagagagcctgactcaatttactagttaactacaagccaagttcatgtttgcaaatgtctttgaatttaatatatttaagttagaaatgactctttgtaaagaccactggatataaagtgatgatataaaatatctgggaaatacaaaaaggccaggggctgggggataaagaggggaggaaggaggaagtggggggcgcccagtgatgccaattccatctcctttaattggtgttgattcctgttgtctttgcaagagctttttatattttattttgcaagagactacaaaaaaaaataaaactacagagttttaaccaaatagttattttataattaatgtttatgatttccaatttactatcaactatatatatctctatagcttataattagaagtaatttctgagtataatatttgtattgtaaatggccccagctggcttttttatatttatgttcaaagcatagtgcagagcatgttgtaccttagctatgtgtgtaaacgtaaagaattgtcatgtatttattttcttgtgaacatggacaatgtcatgcagcatgcccactgtttggttgtagtcagtcctggcaagtggaagtgacctgtgatgacatctgctctcatccctttccagaggcggaggagctgtaccagaagagagtgctgaccataaccggcatctgcatcgccctccttgtggtcggcatcatgtgtgtggtggcctactgcaaaaccaagtaaaccttctttctccatgcctttctctctccttcatgcagagacagcttagatggccagggctttgcagaatctgagctccacagcctagtcttggggataaaaaaaaaaggaggggcagggggagattatttcctctgaataatccattttgaggatgtctcctaaacacagaaatagaaagctgtttgcctattcatgtaaagatttctgttcaatgaccacagcccctgagtggataaaggcctggagggacaggcttgtatggaaggtatgtgtgtgggtgggacagaatgaaggcacctcattctaaaaggagagggagggtaccagaagtccatttgagggctttagtataattaagttatccccaaaagaaactaacttgcacctagaaaaacttctatgagttagagactgactgcattcagggtgcagtagtaccttcagttcaaaggactactgagaacaaatccaatttacactgaaaattacgagataaaggaaacctttcgtggtatctgaaatgcagttttctgagttatagtgattattattattatttttaaattctatctaattaggttgccagtatgaatgctctcacagcctgagatgtaaaaaaggaatctcaggggaggaaaatgaagcaaaactttctttgaaaacataagagagaaaacattagaatagatttgggttccctatgtttggtcttgaagtttggtccgtattaacaaattcaattactatgtgacatggattctcttcacttttctctcctacatataacttacatttcaagcctaatatgttaaattaacaaggtttttgaaaaaatgttgctgcacgatactctgttgccaaaccatccatgggaatatttcataatctgaatgttgcattgaggaagaaaaataatatgcttttatgccacaaaatccaaagcatggattgtattttgtcaatatcccatgatttagtgtgttgccagaattaagggatagagataagccttcctggagtcgacctggtgagtctcattagattccatctcaatattcgctgcctaattgcacaaaaagcgttaccagagtaggaacatgttacgattgtgccaaaatccgctggcaaaatatgtccacattctcacgcgtatacatgggatacactcacaaacatgctaactgtgtatattcaaaactcagttcattttcttaagagaccccaggaaaagctataaatgaaatcactcttataaattctacagcacattttttttttttagacagaatctggctctttcacccaggctagaatgcagtagcacaatctcagctcactgcaacctccccctccctggttcaagtgatgctcatgcctcagcctcccgagtagctgggacgacaggtgcacgccaccagcccggctaatttttgtattttttgtagagacaggacttctccatgttgcccaggctagtctcaaactcttggactcaattaattctcttgcctttgcctccgaaagtgctaagcttacaggaatgagccaccccacccagcccagcacaaattattatctaagacaaataagtgtccatttgtaagacttaggcaaagatggattgattaggaaatttgtgattttagtcaattatcaagttatttgtgttatcctatttttttcttgtctctcagtaaaacagctaaatttccataagaatcccaggtggcttttaaaatctgtttggtaaggatgtgtggtttcacttattctgggatacagtggacatactcccttccctcttcctcatcaccagtctactgccttgaactactcataggtgttggtagaataaagacttggctctactatgaaatgaaaataatcaaaaaaaaataaatgctccctttcttatgtccaggaaacagcggaaaaagctgcatgaccgtcttcggcagagccttcggtctgaacgaaacaatatgatgaacattgccaatgggcctcaccatcctaacccaccccccgagaatgtccagctggtgaatgtacgttgactctggccagtggaaaaaactgagcctctctcctttgttcagacgccttgaagtttattttcgaaagctcttaagcttttagctgctgccattaatcaccatggcttccaggaatccaggtttttgccaggagaaaataatgggaacatttttaaaagtggatttggttactgtaaaatcagcacatttcctcttataaagtgttcattaaggggttggaataatagtgttgggtttgttctgcaaggaggccatagctggggcttgcgtggagagagtggggagaaaacaaatttaatagtacgataatcaaaaagaatgttttcatatataacttggaaatacaggctactccattctgtaactgattagtacagataaccgagcaaagagctttagagttattttcttagggcaattcacagtgcctgatgatttactggttatgatttccaaaggattctgatttcctttagggcgtggaaaggtcaagtgacttatcaaacacccttctcagtagcaaaagaagagtgtcatgccagcttcttccctggccctttctaaatgatgtcaagccctccagatgaaatatatccataatcattaaaatatttttttcatactgtaccaaacactcagcattcagttttttaaatacaactagatcatagaatattaggttctggagagtttgaagatattatctttcaaatctctctttttctttttacagataagggccagagccgcaccatctcttggcttttggagtattgctctttatattccagcatcatccttcttattttcaaattattgctctgatgtatggtttttttaatacacaaagcttgaagcttatattgtagtaccattttctatcctatagaaaaaggcatattttgaatggaacagatatatcatagacccaactacagagttggtggttactaaactatcagcaagtcttgtagcaaaaaccttcaaaactttgttggagcaaggtgcttataggttaacacactctgttgccttttcaccctctaacagtgttcatcacaatgttctccacatttgataacgatattcactacaaaaggaactataatctgtcactctgcatgttataatatataaacggtagaatgactgcctagattacatttactgctcacattgtgcatctttgggctttaacttttctcaaccttatttcttcaatataaaaacagacctaaaaataatacctacttcagagactccttgtgagccttaaataaggtaatttgcataaaacacttagtctagtggcatttagtgagtgttcaataattgttaagtatttttttcattagattcactgagcttatgttgccttccaaaaagcaatagtgaaatggttcagggactggaagtaggtcactgtgtatcctttccttaaatcaagctagctgtacttcccaggaagatccacatggaatagcctttccactaagagaaccagctagagtttcaagcataattcaagctgtatatttttggatctccctgaatatatttagagcccgcagaccgtcagattataaagtgccttatttcatcaaagagtattcctttctattggttttcctattatttaactcaatttggtataaatactaacagcaattaaaacacaacttcaaaaaggggcctccctccctaatagaaacagtaaaaactactgtggtttgctgataaaaataaagtagactctgactaggcatggtggctcacacctgtaatgccagcactttgggaggcagaggtggacggatcacctgaggtcaggagtttaagaccagcctggccaacatggtgaaaccccatctctgctaaaaatacaaaaattagctgggcatggtggcatatgcctgtaatcccaactactcgggagggtgaggcaggagaattgcttgaaccgggaggtggaggttgcagtgagctgagattgcaccactgctctccagcctgggcaacagagtgagactccatctcaaaaaaaaaaaaaaaaaaaaaaaaaaaggagaagaaaagaaaagaaagaaagaagagagaaaagtagaatctacctgcattaaatagaaatgtcctccatatattatgtgctttgtcaagatgtgtgcattgacaacaattgttaagtcccttatcagtagccttgttagccctaccactgctaacaagttaaacatttcagtgacattagtagggcaacatgggcactaggaaatggaaggagaaaggtaggcccaacatatagagattctgaatatttttttctagtgctttgaaatttgaaactatacaaatcacctgtctgcttctatttcaaatagcatttagccttcttcaccttgcaataccatgaaacaaatgaatgttggatggatatttgtatggaattctagtcattaatttaaaataaaatagaagaaataggacttttgctgataaaatgtagttggaatgatgggccgtacattggatgcacatccagagagtatttttttttttaactctattcatctaatctaaaagccacagtagccaggacaggattttccacctggccattggggaaatggaatttattacaaatcagctgtacaaaaatagatttgtgtgtttctgacagtgttaacgtttttatttacatgacaatattagtgctttgattgacatgaatctacgtgaatcttcaagttgtgtctctttgtttatccagcaatacgtatctaaaaacgtcatctccagtgagcatattgttgagagagaagcagagacatccttttccaccagtcactatacttccacagcccatcactccactactgtcacccagactcctagccacaggtatgagaatttaaaaattccacggcttttctctcagaatgaattgttgcacattgccttttgatatccctgcctaagaaaggaggcagtgaaatggatggtctttgggcagcaacagattttgaaaatcaactggctttgcccttaattcctgcataaatttgaacctcaattaggtaactccacagggccgttgtttcccattcctgagattgtctttactcatgccctgctactcaccgaattgctacactgggacaagtctgtctttggctctgcaaaatacttagaagtcaatttctttcagtaattggattgccctgggaaatgcacatgagaattggttaaatagtggaaccctaaattctcaaatgccctggtgatccccacctgagtgcacttactctaccaagaccaacactagatctccaaatgtagctcatacaaggaaatgtttctttaatctaagccactcaagaacagagagattataattatatactgaggagtggcattcgaaaatatttattgaatgagtggacaagtgaatatactgtatccttacaaagccaatctgaatcaagatcctctctatagcaaattacctttgtggcgattctattcggagacaagtgatgttacagtgagctccgggtgcatcagtagtttgaaacatttgtcagaatccattcctttcatttccatttttttgcatataatttttgcacgaaatatctgattgtctctcccatttcctccgcagctggagcaacggacacactgaaagcatcctttccgaaagccactctgtaatcgtgatgtcatccgtagaaaacagtaggcacagcagcccaactgggggcccaagaggacgtcttaatggcacaggaggccctcgtgaatgtaacagcttcctcaggcatgccagagaaacccctgattcctaccgagactctcctcatagtgaaaggtaaaaccgaagggcaaagctactgcagaggagaaactcagtcagagaatccctgtgagcacctgcggtctcacctcaggaaatctactctaatcagaataaggggcggcagttacctgttctaggagtgctcctagttgatgaagtcatctctttgtttgacggaacttatttcttctgagcttctctcgtcgtcccagtgactgacaggcaacagactcttaaagagctgggatgctttgatgcggaaggtgcagcacatggagtttccagctctggccatgggctcagacccactcggggtctcagtgtcctcagttgtaacattagagagatggcatcaatgcttgataaggacccttctataattccaattgccagttatccaaactctgattcggtggtcgagctggcctcgtgttcttatctgctaaccctgtcttaccttccagcctcagttaagtcaaatcaagggctatgtcattgctgaatgtcatggggggcaactgcttgccctccaccctatagtatctattttatgaaattccaagaagggatgaataaataaatctcttggatgctgcgtctggcagtcttcacgggtggttttcaaagcagatactgccttcaagatggccctttattccagaatgttttggctttcctttggggagattgggttgggttgggggagttatagcaaaggtaaaatgaagaatggaggaaagtaaacaaagagatattaaatagtaatattgaattcatagattctctttctccattttcacctgagctggaagatgaccagtatttctagcccatcagtaagctgttacctgttcctatttgtttgcaagtctgctgggttttactttattttattgtcatctcaggctaatctttgaccatttactaaaaggtttacataatgtcaaatccatacttatgtggtagttacatgggaggagatgactttgatagagtctttccactcttggactgggaagttacttccaataaaataacacattctgggcttgaaggcctgttgcttacttttgcaagggcctttccttcaaaatgatattttagaactttgtggaatttatgaaatcagaggtaagctattacctgtttgtttgcaagtccgctgaattttattttattttattttattttattttattttattttattttattttattgtcatcttagtctaatccttgaccatttactaaaaggtttacataatgtcaaattcatacttgtgtggtagttccatgggtagggatgactttcatagactcttcccactcatggactggggagtacttacaataaaaaatgacaggctgggcacggtggctcacgcctctaatcccagcactttgggaggctgaggtgggtagatcacgaggtcaggagatcaagaccatcctggccaacatggtgaaaccccatctctactaaaaatacaaaaattagctgggtatggtggtgctgccctgtagtcccagctactagggaggctgaggcaggagaattgcttgaacccaggaggtggaggctgcagtgagctgagatggtgccactgtactccagcctaggcaacagagcaagactccgcctcaaaaaaaaaaaaaaaaaaaaaacattctggacttgcaagcctgttggttacttcttcaagggcctttccccaaaaatgatattttagaacgttatggaatttatgaaatcagaggtttccctgcaaccaatctatgaaaaagtaggcagggtttaaactgttttaaaactttagtcttaaattcatatttttttaatgtattaaggaagtctatccattctgtttcaatcgttttttgaaacatgaaaaggaagttagagatgaaatcattcttcatcactacaagtgatatttatccttaaatgttgacatttccccactgtgctgggcttctagatgatatctaggactacgaaatattcctgaacctagagattatggagagaaaagatgaatcacttttatatgttggttgaatttaaattagcatttctcagagagcttaatttaagtacccccaaagccaaaagtttgaaggctcaaggcccacatatttcaatttctcaggcacgttcccagtttagaggcagctagctctcacgtctgtatcactgtgactccgggagaagcagggaggttcatacgttttccgttcctgttagcaagagttcagatgatggcattccatgtcatttcaggtcacgtcaaattagactctgtgaatgccagtgtgaagaaaagagtcatttagtgttgtgcgttggtaacattttttatcaaaagctgagaaatgtgactctgaataagccacgtcttcctcagtgccaaaagtcaggacttcttatactgggggaagaaagcatggtgtggtgaaaacagtgtgctcggtggcctaatggcaagagtcactgagcattatcagacataacatgatagaaggtaacagggtacagccaacccttgaggcatcatgaaagagattgaccaaagactgatatagctgtgggttttggaagagagatagaccaaagattggacataacctccattgtggtaactgtgaagccaaattaggttctctcaggcttacctttgactgtgtttgttggacactgggatggatagttccaaattgaatgttaactagttgcatttcatggaaaaaatgaaaagcacacaaatgtatgacactgttgtcaggaataaatctaagttactatgctctttttttttcataagacataaccttatagctgagctaaggagaaacaaggcacacagatccaaatgcatgcagatccagctatcagcaactcatcttagatcttcttccattccccatttgggcttcattctctaagaccccttggcctttaggaaggtatagtatttaagtaatacttctttcccttccgaatccctgagccttggtccttatataagctgagaggtttccaggacctaatgccttcttgtcttggctcatatgccattatttataattgtgatgagattgaaaatcccaaaagctttgatgagctaggcaatttagctgatctttgcatgcactcctgtgaggaaactcttggctacctaattttcgattccaagggtgtggaatttcctagcctaaataattaagcagcctacaatgaatagaaattctctgttctctgatgatataataccgtgaactctgtccccttaccttccctgctatgtgcctcttattgcaccacacttatgcagggtattctgtgctcacacaggtatgtgtcagccatgaccaccccggctcgtatgtcacctgtagatttccacacgccaagctcccccaaatcgcccccttcggaaatgtctccacccgtgtccagcatgacggtgtccatgccttccatggcggtcagccccttcatggaagaagagagacctctacttctcgtgacaccaccaaggctgcgggagaagaagtttgaccatcaccctcagcagttcagctccttccaccacaaccccgcgcatgacagtaacagcctccctgctagccccttgaggatagtggaggatgaggagtatgaaacgacccaagagtacgagccagcccaagagcctgttaagaaactcgccaatagccggcgggccaaaagaaccaagcccaatggccacattgctaacagattggaagtggacagcaacacaagctcccagagcagtaactcagagagtgaaacagaagatgaaagagtaggtgaagatacgcctttcctgggcatacagaaccccctggcagccagtcttgaggcaacacctgccttccgcctggctgacagcaggactaacccagcaggccgcttctcgacacaggaagaaatccaggccaggctgtctagtgtaattgctaaccaagaccctattgctgtataaaacctaaataaacacatagattcacctgtaaaactttattttatataataaagtattccaccttaaattaaacaatttattttattttagcagttctgcaaatagaaaacaggaaaaaaacttttataaattaaatatatgtatgtaaaaatgtgttatgtgccatatgtagcaattttttacagtatttcaaaacgagaaagatatcaatggtgcctttatgttatgttatgtcgagagcaagttttgtacagttacagtgattgcttttccacagtatttctgcaaaacctctcatagattcagtttttgctggcttcttgtgcattgcattatgatgttgactggatgtatgatttgcaagacttgcaactgtccctctgtttgcttgtagtagcacccgatcagtatgtcttgtaatggcacatccatccagatatgcctctcttgtgtatgaagttttctttgctttcagaatatgaaatgagttgtgtctactctgccagccaaaggtttgcctcattgggctctgagataatagtagatccaacagcatgctactattaaatacagcaagaaactgcattaagtaatgttaaatattaggaagaaagtaatactgtgatttaaaaaaaactatattattaatcagaagacagcttgctcttactaaaaggagctctcatttactttatttgattttatttttcttgacaaaaagcaacagttttagggatagcttagaaaatgggttctggcttgctatcagggtaaatctaacaccttacaagaggactgagtgtcactttctctctgggggaatgatccagcagcttatctagttgacaatcaaaacacggctgataaaggtgcaatcatttctgacatgtatttttcactgattttgaagctagtgattggttgtgtcttcttggctcaaaaagaagcatattacggcacaaaaagcccagcccagacagcacatgcagcattttgtctgaaatacttctagagtcaaacgtgcctgctgtacatagcgatgacttgtcatcatagggaagtatttccatcgtagagtgttcagaaggagtgactgtataggtggagagaagcttagtgactccgttgaaattttaaaatgtggatgaccacccctttctcccccttatttttcttttatctttccatgttgccttgatcaggtcataactatgcatgaacattttttatcaggaatggccgatgtgtatgtgatttgtaatcacaagtaatgattcatcaggaaatgtcaatcctgttggaaagattgcacctttacttgcagaagtgacccccacctgtgtcctgacctctccatttacaggctctctcacccatttcccccacctcctttaatttttgctttactgtcataaagtaggactaagattggtctaagcattgcatgttcttttgtgatggtaaatccaaaggaaggcctataagtattaacatttgaaataactgctaattcaggaaaatggaagaaaaaaaattatttgaaacacagaacccatttcatggcctgcctgatatctgtgaaatcagggctggagctttacttaggattcacatggcctcctaggaaccatgggacaaatgggaaacaggttatcgggggattcatgaagtcagtgagagtaattgcttcttttttgcgggtgaactgaatgtatttcttcaccaaatcttgatgttaacaattaaaaagaagaaatgacatgcaagtaggtcttagcagaaaaatgcaggctgggcatgagtcatgttgttaccctcccacatgctcctacaatccacagagatgcctgtctgcaggttcttgaagttattgttagtatttggtatctcaaatttttcgtcactgttcacatgccactttctctgtgcacagtggtatcctcatttgctttttaacctacactgaggagtctttgtcaggttgcactgattttccaattctgcagtaatgagtaagctcacggcatggggaagaagacagtcagtccaatgaagttctctaaattattttaacattgcctttgaaggccttgactcatccttagctatttcaatgaagaaattcctaccatgaattt

SEQ ID NO: 409 - DNA, 1117031 bp, Homo sapiens
  source 1..1117031: mol_type = genomic DNA
tcctttttatttaaagatgaccacatatttaggggtcaatacagtatttttcatagtctagctgccactctcaaatattggtgacctctacatgcttaaagatggatgctttgttgacttagcccttgctgcatgttagatgttcactgactatcttcaaggtgttaatcaaagatttcaattcttggagaagtttgcccttaagtgactattaagttgttcagaagagtagacatatgtgggatgaatggggtgattttcatacactgggcctcaataaataattgaagattgaacttgtaaaaatgaagcaagattaattgcaataaaaattgtataactggacatttatttatagagacggatactgtaatggttaaagttagttcatgccatctccttgatgctttttttttttttttgagacagagtctcgctccgtcacccaggctggagagcagtggcgcaatcttggcttactgcaacctccacttcccaggttcaagcaattctcctgtctcagcctcttgagtagctgggaacacagatgcccaccaccactcctggctaatttttgtatttcttggccttcttattactcgctgaaccattcatcttcagaattatttctaaaaaagttttgtttatgtctaatgtctgttttagtgattctcaatcatttgggaaactttgaaaccctttgaggatttgatgaacctaatgaacacttttatcgggaaaatgctcatttacatatacctgccaagttattttatgtataaatatatactatatataattattttatgttaaatatttaatacttatattaaaatattaattttaaatatatatataatagcaattatatatatttacattaatatatctatccattatatatacatatatatcttttacatatatatttacatttatctatctctattattgtacatataagttagtaacccctgatgcctaatcactgggccctgggcatctatgccctctataggttaagacccaaaatccttggtctgattactaagttttatatagcaaccgcctttgaagtgcctacctatttttaagggaaactaaattatatatcctttaatttagacattaacaaaatgtggattgtcatgaattaatagcaataaagaaataacaaatatatctagacactgcaggaacaaaacgaattaagcattcatgttcagactttttactgttgaagaaaaaaagtgcattttcatcataaaatcattttcaagtgccagggttttaaaacaacagtttccaactgttgaactaaaacttacttactctgataaatcatctgatttctaaaaagctaattttctttgtaagaaataaatacagttttatggaaacaaacactacgttcttttatatatttagatttgtttgtttttttccaaataaataacacaatgtgagagtcaaagaaattaggcaaatagtaacgagtatgtgatagtgttggaatttaatcacaggtttacttaacttggattccattgtcttttatagagaaaaagcatatttatgaaattagtattttaatattgtttgcaactaatactgtatgagtttatggtttctggcatatcaagatgaacaaatataacaaaagtacatttaatggctacatctttaagtgtatgaatatagaggtctttaatgactagttaaatccagaaaaaagagagtcaacattcttcctctataatataaggatgggtcttcccttcaaatgcagccttctttactttcccacttaagcacgaaatggtgccgcatataatttttaaaatcaataaatcacagttgtattaagaaatattttattaacaaaacagtaaattccacttgcttagcatttccaataatggataaattggccttgcaacagaaaaacaaacaaacaaaaaaagaagaagaaaacccctttgatacccaatcacacaaagcactagaagggtagggttatgtggcctttctttgatgtcttagggattgaccacttcacacgttattgtagtatttgttcttttaaaaaaggcaacacattacatggataaaaaagaagcataatcaatcagaaaagttacagtctagagatgtaatcaaatttatgccaagtcgtgtgaaatcctcaatcaactgcaaactatgcagggaaccctgatatgtttggtatgaagatacttgggattcaagtcattttctctttctaactctgttcctctcttttctttttccattgaggaaaaaataatttttgctagagtttgtgtaagccaataatattagaaataattttgctgataataaactatatcaatcattgcatgtaactttaaaatttacgctggggagaaacattgaaatcaatcccaaacaacacatttcatagatatactgcttaaaattaccattattcaatttattttctattatattttagaatctttccagatggaaactggttcaagcttaatagataaaatagaaaagcaatcttaaaaaaaaaaacccttcaagctgtaaattagtagttttacacttcccttcttatttaactggctttccctgagtaagactgaatgagacgggggaaaagaaaagactcgtgaattatttaatgtggcaaattaaaaaaaatgaaaatctagaaaagaagcaatggatattaaattttcattttataccttctactttctgggtcataaaaagccactaaatttctttgtacacaacaattacttggcaaccatagatagtggtgatttgctatgaattatacatatttctaaggtgctgtatgtctgaaatccaggccacttcttggcttttttttcatcaactaaagtatcacaaaagatgttttgcattttttgcctttgctgattaaagctaattggaaagatattcttctcttctacaaaattttttatcgttcttttagaaggtattcaagtaatgcaaccaatttttcctgaaacatcaacttgcaatgtaataatgcattttttgcactaccttctcatattagtaatttattgctgtgaacatcattgaataatatgcaaaacaagtgtataatctatacttttccactacttaatgtgttaaactaaaactatatttaatgatatatatgtaaaaccagaaaagttaaaacatagtcaataattaacagagaatgattttttaagtgggtagtaatacagaatcaaaaattactgaaaaatactttcttagtcgagagaaagtgtttactttccagaaatgttcatcatgcacatcagattcagagatatatatattattttattagaaagaaagttttcaattgcagcagccagagttaaggtgtagattaaccaattttgcttccataacctgcccacataatggttcttattcatgcagcagtatatcagtgatattctatttgataaggaaaggttcatttctttagggactaaaatcttcttaaggttacctgggagcaagatctcaatgaagcaaatcaccccatttgtcatcaataccttggcacaaccctcttccttcctgcttttcaatttgtcaataaatatttgctactgtatgcacgtttggatcttccagcatatctgatggattgctgtggattcgtgtgtgtgtgtgtgtgtgtgtgtgtgtgtgtgtgtgtgtgtgtgtgaaaatagtgaatgtatgtgggaatgtgagtatttcagggagaaaagattataagatacatatgtatatatgtgactttctaattcacacctttcatacaagtactaaaacttaattgcaacagaatgaaggctgtacatataagaaaagaagtagctgagtctttgtatatacattcatacatatcttccttagaataaacactacactgtaatttctttaaaaaataaaagtaattgtggcaatttataatggtggcaaaaaaaaagaaaaacccaactgaaataattgttgctctgatgtcataaaactccctatacttagcaacacttataacattgaatttaccaaaaatggctgaagagcagagatatattttgcattttctatacaacaggctataaaacgtcacttatcacagtccagaaagcacacagagatggattttatataaacatatgtaataacataataagcgtgcatgaaaatttcccaatgattgcatctatgccctcttgtttttgttttgaaattttgtgtgaaaacgtgccttatatttcacatttttgaaaataaggcctccatacttttttttcctctctcacaaccagaaaggggctttttgaatgtgttcctacacaagtcttcaaaaaagccagcactttgtttcaaatgcaagttccaaccactgctccagttgcaccaggcggcaaactcttaaaggtttgcaggttgagtcactcaaaaggacagtcttctctggcaattggactgacttctcaggaaagcgctagcactttggctaaatccaggatcataggtagcttcttttttgtgttatgttttgtgttggtttttgtgttgtgccttgatgctgtagtactcctttgctttatgaatgcgtgcggtcatcactgtcttttagaaatgttccagcaacataaagacaagcagagtaaatgaaaacactgtggatgttagggaatttattggcccctgttttttgttttttgtttttcttttttgagaaacaagagcatgagatacttgtttttattttttaaaaagtctttccttcctgattgcattccctgtcttcttttgtatgtgcttcataaaaaggaaagtaaataagtttatattatgtctcagataaaatgaagactatttctatacaagtgtccatttaagatcttgggatcagacataatactctttatccttgtttttcttatttttgttggagcttttcgcactgctgggttgtttctcctttacaacagccccattggactgtgctgagttactgatgtagtttcgactctcgtccacatggtatgagccttcatcccggtttctgtacttgtacatggcatagaggaggataaggatgcacagggcggcagcggctactatcccaacgaccatacccgtggtgctgctggactcccggatcacttctgctgagcctggatacggctctctgccgcctgctcgggttgggttggctatagaaaagaggatgagaacaaacacaaagtgatcattgagttcactgaataccagagagctatattaacatttattatctaattctaacagcacctatgctttaggaaaggtatgctattgataaatgtagccatccctttgcctcatggttactaaaaactagggactgtgatttaaagttctctgggagatttgttgctgtgtcttctttcttcacaaatcaattttgttcacagagtttggtaagcattgtcccaaataaactccaattagctctaaagggccatgtgggtgacttaagtaaaaaaaacccacaaacccagcataaagaaaagcagaacagccctaccctataatactagagggaatcataagaatcaaataggtgttgctctagaacataggtctaactctagactgaatcaggacaactaaatttaggattactttagaaatcatattccccttgtattttaaagaatacagtattgaacaataagataatccatacattttaactgtctgctttttaaagtataactttagttacatttttataaataaaaatagactaatttccattttgttggagattcatttgtttacataagtatgtgtgtattttattaattgattggggagctcccaagatgaactttggaggagaaagtaataaaatattctttctcagttttaaatacagtctagattgattttttggtcaaaactctgaactacctaatagattagataataatagaaggctggctagtctagttttattcaactgacaaaacccttcttcagtcttcccaaagtataaataaggctctttcttggatgagaccaatggattttggggtgcctacgtcttcttgaaggcctggtcaggcactgaaattgatgattgatggggaagaatggacctgagatttaattggtagatatgaggagaaggggcagctcttttcccctatatataataaacttttttgatataaaaggatagaaactgtagcgagagaagaagattctatcctactctgactgtaggtcattttttccttgtgaattgtgttttctgtttttccctgaatctctatcctctcgcttgtcttacataaaaatattacttttcagatgtaatgtattaaaaatgctacaactttcaaaacactattctttgccaattatgtataatgaacaaataatctcatgattccatatatattagataagaatgtgtgtgtatgagtgtgtgttcatgtatatgtaagaactgaaaactcaagaagactaaaattgtgcttttatttcgctactactaaacatcatttagtaattaattttaatatttctgcaaaagttcttgttaattactgggaatcattttaccaaacatatggctctatactgctttgtaattccattttcaaatatcaccaatatttcttttgcctaaacgtgtgtgtgtgtgtgtttttctgtgattttcttttccttcctcaaataaagccttaacaaatacagccatttccaaagtagtagctcttagtctcaaagtagcaataagctatgttctggtgctacaaaatgtagcaggtaaaactttttatgctgaatgtgtcattgcttgttttacaaaagcccacggagtgtggctgaataaaaagctttggtgttgcttctgtggacaaggtgaaaggagacaaagactataatccacagtatttgattacaggaattaatttcctctcatgaagaatagaatctactgcagtaactctgtcactacctgacaaaccaaaggcagcactttttcttttaaatacagtcatctttgccaaagtgtgccaattaactcagctgctttcactaaatgaaaactttcattttacagagcattcttttactatggtgtctcaagagctaaaaagggaattttgtttaaatgttacctaaatcattttttccagcctgatggaatgctttcattttaaacacattttcacaattacctcacttttactctgtctgccagaaaggaatagggagaatggagataacatttgaatcatttagcttatgacagtaaaatttgagaattttaatggagtggagggtttatattttgtatactaagaatagacatgtatttttttcaataaggaattgatatcgtaaatggactatcttatcaaaaaaattttatttttatctgctaaaatatttctgagaggttttcaaaacaactatgcacatagcatgataacagcaactttgtgttaaaataagaatgaggtcacaaagaccataacaaagcctgaaacacttcaactgtgccatatgcatttgaaaacatctcctgtttaaggaaaacactttcttttttgcaacactagccaaattgttgcttaagtcatatgaggcctaaaaatatctctacacaaaacccagatgtaaatcccagatgtaaaaattctaaatatcatgtttcttaaaaatataacctagaaaatctctaccaaaattaaaatctaaacccaataaacatgttatctttcttttccccagattcacattaaaattttaataaccatcatagcagatattattataggtatgttcggaataggtagttactccaatatctaactgattaattaatattctttttctatttatgcttcaaatctgaaggctaagtgaaatttttcttaacttttcttctgagactagaaatatttatgtgttggtcgggtgtggtggctcacatctgtaatcccagcactttgggaggccgaggcgagtggatcacgaggtcaagagatgcagaccattttggccaacatggtgaaaccctgaaatacaaaaattagctgggcatggtggcatgcacctgtagtcccagttacttgggggattgaggcaggagaattgcttgaacccgggaggcagaggttgcagtgagctgcgatcgcacactacactccagcctggcaacagagcgagacactgcctcaaccaaaaaaaaaaaaaaaaagaaagaaagaaatatttatgtattaatgggacatctctcccagatatgcaataacaggccaaagagatttaaatatattcatgaattataaatgtggcttctcttattgtcgctaatgctttattttgatgatcactgagaaatctctgatgaaattttatattaatgtaaatgtagagaatagtatcaatgactaatatggttaaatgtctttttatataatttgttcaaaatttatataaaaggtaaatgcagtcatctcatccatttactaaaatgtgaaaaaaagagaaacataattaatttgtatatttcatggatttaagaattttgcattccctctacactatataataaactaaaataagacatttttaaaaaattaaagcaatctgcaacatgtttttctcttagcagtgctgaaatgtgaataatgtaattaattaaaatttactttcatccttttctttctttgtcccagcacgtgacaaagaaacaagtgaaagagaataacttgttaaaaaagatttaacttgttaaaaaaagcaagtaaaagagaataagggagggggagctaaaataatggcatacacacaaataagcttaagtctttaagtcttgaatcttcaaagattaactccgacgtgtaggtaaaattaagccgatgtagccagttcattatattgggcccaggggcataaggaactcggttcaatggaaaacttcagtaggactgacagtggtctactacaagcaaggagagcaagaatgcacaccttcatcacaatacaaaggcttttgacttttgctggcatttttaacctataaatgatttggaagctaatgattattctagcaaggaaatagagcagtacaacagttatgacccatttcatatttatattcacttctttctcacttctgagattcatttagccaaatggctatagaaaaatccctgggactcttgcacttataaagcatgttaccttaaaggaccactgaaaagtagtttttaatccttcctctctcttctagcatttggtaagatacggtggtctctagaagttttccacatggtctgctttgtccctgtagatttatcaagaatcctatgaatcttcttgttttttgttgtctaatatgtattgtggtaacttcggtaaacacgagctatcaaatgtttggacagttagtaacctatttctgcactatgctctaaatcaatttgttcatatctgatgataattcagatgataattcattgtggaaaatgaacagttactactaaaggcatattctagtgccttgtcacatagaaaaaataaatgcaactgttgctctccattaaaaagtaaaaaaaaatctttaagattttaatttgtcttttgctgagatagttattttaaacaacaacaggaaaggaaatcgccctatgtattatttatttatttttgatagtctttgatacagtatctgtgaaagaacatcatttcctcaaattagaacaaatttagatccaattaagaaacacatggggaaaatatgtttgagacacattagacttcagtacagaccagagagggctgtcagtgcaggcttcatctcttaccagcttcttgcaccctctgttgcttcctccattctcctctgtatttctcctcccacttacccttctttattgcctctgtgccttgctcttccagctcctgaattatccttgtaggggccctccccacccccaggtaaatgaagaaggtcaggccagcaggggccaggactttttgcctcatgggttagcatattactcaggaaggtgttcaataaaccacaaaatttattttcaagttctgaatttcaaaacacaatgtaaaataattcttactggcacaaatgtctaagtgtgactatttcaccagaacaggttttgtgtttcatattggcatgattacttttaaatataactttctaaatttgtttgcaaataaaattgtatggtttggcaaaacaaataatatttgatcactaatttaaaagacttttgtgatgcatctggtgatatgatgggggcacattaagccattaaactttgcattgtatttatcagtttgcattgtttgattatatctaatcacaccttagcatatgcaaacagaagttaaagcttgcaattacttagtacaatgattcacaactgaagtgctaaaataactaagcaatttgaaagatagatacatttttgaatgttaataaatttttccaaggagatttccctttgcaatggtgacatccttcatttttctttttgaaattggaaacagcaatcaattattgtcattaaagaaaactgctcttgatctatgtttttgcaactctgcatgataaatggtgtttaaaatcctaattcctgatatagaatggggtttggtgggtggtgggaccttatctttctattgacaagttcaccaaggcattagcatgccatcagatggtctttttatcactcaaattgtcatttttatgaaattattttgtatacttgaatgagctgttcttccactgtaatcttatatatatattttggttccaaagttaactttcaaggtaagtttgtagtttctaggtaatttttcgggctggttttatttcttcagtatagactgttaatgtatgtgtatgtcgtcaactatgaacctggcacaccaaggataaagtaagagtatcattataacctgatgacaatggaaattcagcttttgagctttgagaaaaagattgtaagaaactaccaatcttaggaaataataaagaaaaaaacatgctagtggttaaaaaaaaaaacataggctatatatttaagatcaggaggggaccataagggatcattaaactccataatgcccagcacgcatcattctgctaaccagaattgttagatgtcctgtcttgcaatgatccttaaaaaaaaaaaaaactcttggcaagatgcatttactgaatttcttctcactaagagtttctgaccagtctttctggttttctcataaattaagcttaaagtaatagattttaaatttctgtctccaccccacctaggaaagagttgcctaaaatgatctcattagaccagagttctatactgtgtctaatagatgtggaagttattataattctaggctagacttgaaagtgattttggatttatagggggaagatttgacttttccaatactcagtttcattaatactgtgaaaagaaaattggaattgtagcctcctggggtgtttgtgaattgagattagcacacttttttcccccatttgaaaaaaaacaactcaaagtttattactttttcccatttttttgcttcaatacagtgtaggccagaagaaacaattatgatgcaatcattcacaagaagccatgtttaaatactacatttgtaggaaagcagggacacaatgatttatatgacatgcattaatttcgactcatgcggtggttttgtaagaagtgagggatgctgactgtttcaaattccttcccttctccctcccaccaattccacccatgcctgcacattctgaagtacacttacggaggtcagacaagtcttgagagaggacatgtctgacacatcttagcccttccccaatacatcggagatttagaaagaacttggaaatcaataaacctttgctacctgcctggctgctgtctccgatattttcctctgcttctttcaaaaccaccaaagcatgcatttgaagggcagttaaggggccaccactctgatattgagacgttcattatcttctccagagatctaggtattgaatgggaagggatgctagacacggaaaaactcatcatgtgcctgcatgatggagaaacccaactaggacaggctgctacctcatatggtaccacatcgaacagaagagacaatggatgtccacactctgtatgaccttggtgacactgaagacaaataaacagaggaacatgcacaatctccctcatctccaggggaagccataggatcatggtatttacaaatcttattcttcaattattcactatgttgtaaactatatgtccacagcttagtcatctataagcttcatagactttttacatagtcattgtatccttgtggtttgcatctattatggtgcttactccagcaccatggtccttactgttcccatggccattcatagtctgttcacagctacctactccaatttgtcttccatatttgtcaaaggaagttagagccataatattattgctgtccccaactcctcacataccaaaaagagttcaacctttatgccttgctcatataaccttttatctcctgcctgtttaaatagtacttatttctcgaagcttggctcaaatgtcccatcttttatgattttttttctctaagaaaatcccctccttctatcaacgagtatataatgagctatagttaacattccagggactatatgaggtcctgagggtataggagataacgaaacaaacttgatgtatatgtcctcatggaccttaaaatatagtgaggcagagaggcatacaagaaggaatcacacagttaaagtaacagctgggatatgcatgatgaaggaaaactgtaggtaccatgcaggagtaggacaaaggtttctgattgcaactgcagaatcagatctttctgaattagtgacacttatgataaaaatgagtagagagtcgtcaagtgaaagtgggtagagaagtctacgaaaaacatgtcgaatgaccttgaggaaacaaagtttacttttcaggaattaaacaacagttagagtggttgtagcacagtgagatttaagggagagtgagaagaaatttcaaggtggacatgaaatttatcacagagactgtagactatggaataaagtcataataaaaagatgagcgtatttaaccccataaataacaattttatgtggcaaaagccataatatcattaacaaaatgaaaatgacaaaggagggaaatatctgtagtacatatgacggaccaagagtaaatacctctaaaatacagagtgtgtgtcaactgataggaaaaaagacaaacaacctaacagaagtatggagaaaactacacacaagcaagtggagaagagatctcaatgctggtgagaatattcttaataattatttgattgttattagaaagtaatccaataacatctattaaattttttaaaataaataaattctctcaaccgtatatcacatcacaaattttaacattaattctatactattgtaaaatctcacttaaatgtttcatccaatagttttgtcttttttcaactagactgttggtcctttgacagtttcctgtgactctgtttctctttcttattagttctctcaccttccaaactctaatgaagattgaacacactggctgaaaactgcatgttttatgtatagttagatgaaagcttttgtaacttgataaattttcaagggtaaactaggttgaatctaatcattaagaaagtgtgaaagtgtgaaagccaagaactgtgtggctcacacctgcagtcgcagcactttgagaggctgaagccaggtgttcaagaccagcctgggaaaaagaacaagatactgtctctagaaaaaattaaaacaaatattagttgggcatagtggtgcacacctgtagtcctagctactcgagtccgaggtgggaggaccatttgagcccaggagtttaagaatagagtgagccacgatcatgtcactgccctccagcctgggagacagagcaagaaagtgagagacctttgattttaaagttttgagtaaaggtgctaagcaagggggttgaacactgacattaacatctcatatttctttaactcactacttctctaaccctcaacctttgtaatatctgcagtaaaaacgataaatgtaatatttacttcattaaatcagaaatcacttcttctgtgctttggagaattgggatcaatatacaataatgaaaatactgcatttgctttccctatgcttcaaggtaatatgtcacttaatcccaatgactaaagtcactaagctatttaaagttaactgagtcatcagtttgattcatttggatgccttatttacatcaacatcatctgacacccacagtactgcaaatagttgacagctaacttgagctcttttttcaattcagagtagttgtagaaatttctagggtgcttttcagtcctgttgctattggaattgaaaagggtctctttactcaggcccaactttccataattgtcaagcagaagaaagccatataggcaataattgagaaaatcagtttcaaaactagggaccccagagagtctgtatatgtttttcctcaaaatgtattacattccagaaaaatgcaagaagagttatattttgaaatgtggatgatactccttattaactgatttcaactcaactgagcttcttgataccaaaatagcttctcttcctgggagctcattgactacaacacccaaaaatatatacatccagaaatcacttttcttaagatccatttccttttttatatatagataattgaataatctatctttacaaaataatgagatttattccacagaattcttaaggcctgaaactagaaatttttggaaaacctggtttatagtaagacaaaaatggcaacattatagctagagtaatgaggagtatgtgtgtgcatgtgtgtgaatgtgtgtgcatgtgaatattgcagcattccttccaattctctctcagaagttgctgagtttgctgggcatggtaattcatgcctgtaatcccagtgctttgggaggctgagagaggagtattgcttgaagccaagagttccagactagcctgggcaacaaagggaggagactctgtctctacagaaaatgtaaaaaaattagcctggcatggtggcgcatgcctgtagtctcagcttctggggaggctgaggtgggaggatcacttgagcccagcagtttgggggtgcagtgagccataactgcagcactacactcctgctgggcaatagagaacccaattaaagaaaatgctgaagtcattcttcttatcctttcctttccttttcgctttccttttccttttcccctttcacctttctttctcctttctcctttcctttccttcctcctttccaaattaataggtaaagccaagctattaaatagttccaggaaacctttagcaataacttgggggtaaacttacttaactaagtaatcaaaaccctcatcaaaaccttctttcttacattcttccatatattttaacattactcaattgtcaacttatgcttaacagagctactatgacttccctgtaacatctatattttgtttcttattttatgtagttaacagctattatttttactattattatatggtaattgctgtgctatacattttacacataaatttcatctaatttatttctcataacactatgtggtgtaggtattatcattacaggaaagaaaactaagtctcaaagagcttagcctatttagactttataaatggcacagccaaaattcaaactcaggtctgtctatggctactaatattttatatactcagtgtgtctgcatttatcactgtggatcaatttgttattgcttctgattttattcctgtgttaagtgtaaaaacacttagcactttaggtgtattttctttttttgtttgtttatttttgtttttgtttttgtttgagacagagtcttgctctgtcgcccaggctggagcacagtggcgcggtctcagctcactgcaagctctgcctcccagattcacgccattctcctgcctcagcctcccaagtagctgggactacacgcacctgccaccacgcccggctaattttttgaatttttggtagagaaggggtttcaccgtgttagccaggatggtctcgatctcctgatctcatgatccgcccgcctcggcctcccaaagtgctgggattacaggtgtgagccactgcacccgggctttaggtatattttctaagcagttgcccagttctagcccttccagccacattcctcttcacctgctgccaactctctgtcctttgctgtgggagttaacattcccacagaatcttagaaaagcagtgaagagtggtaaaaagaatatcgaattatgcattaggttctagtctaggtcctgtccttaactttttgagtgacagtttgcagttcattatcctctgctaacattcctttatcagaaaccatgataatgacacataaattatttatatcccaggggttactgtgggcatcagatcaggtagggcattcagtatgaaagtatctgaggaggatgaggactttgtaaaaacagtgattatctgattgttttctctacatcttccacacagaaggtactgaatcagcagctgtcccaacaattatacagttttgcaatatgcactgcacacagtgtctcaatcagctgtggcagtgaccatcaaggacattatctccccgggagtagttgtatttgaggacttccctttcatgaaaagaggccttgtgaattcaggtggcaaaaatggtcctttgcattgtagggcatgttgtttcaggccattaactgtggtgctgcatgtggagcttgtttctgtttttctgtgagacattctatctttaatggatcagtgctctctggctcctatggttggagtgaattacatttctctctctttcaaaattttattatgatattttatgttttaggtgtcataaaatcaatcatctaagactattctttggtaataaatagctgacagcaaggcttattatgttggtaaaaactcctttgattaggtttcattgtttctttctaaaattgttaagtcaattttcccccacttccttccctgctctggaattgcacagtgtactccggatgaaatccaaaggagactttccactgcagaggtgcatgctgggtcctaggtgcacccacccctccaccagggtgcccgcacagcatctatataaacctgagtcattctgtgtaatggggcagtgtacaattttcctgatttagaattgggtctctttgctttgggtgatcatctttatattgctgtcatgaggctatttctgtctcaattttcttttgttgggaaaaagatcagattctttttggtgaaaatgcaatagctaaggtgaaagattagataacttcccctctgagcccattagagggaagtgtgtcaagtctagcattaggaaatacgaaagacaaggcatccatcatggtggggaggctgtgtgggtaggtgtgcctggtaagtcatgctgctgggagtattcctgagtgtcttaggaaggaagcaggaaagttaatcatttcttctctcgaaagcactctccctttctctctctctctctttttgtttagtataaaaagcccaatttttttccctccaaaaataaagtaagaagagcagatgatacgtgccctcctcctaccataggaacctaaatttatccagctaaagcactgctcctgtcttagtggtcactgagaaaagttttatgctgatagaatttagaaatactttgaaaaacttgctagatgctgaagtatccatcattaacatttccctttcttgtttggggatatttccatttatgatatggtttactatttagttagtttgctactactactaataaaagctaatttatgttatcaaagctttcctgtggtagactatgttaagtgctttagatgcattgtctcatttttatcagtacagcaatgtcatgagtattgaacattattcctttcattttgcagatgtaaaaagctgagtacacagagattcaatgacttgcctctaattacacagtaggtggccaaattgagatttgaacacaggcattgggatttctcaagtttactcaataaaacaaaatattttagtgtgctcttagatgtgacaacgtcagtatttttctttctcctatttttttttaatgtaattaatggcctctggctatactggcatctttaatacaccatttttaacctggaaatgtaaagtattctggtctttgctattatattgccagtgtcaggcttcttataacattttgtttatgagtaaggagtaactcatgatgagagtgatctaatcgacaagttactgtgttgagatgagagctgaaggctaaagccaaatgtagcatttgctgccccttggagcatatgtgccaacaatgaaagcatattggctcctcatggaggcagcatgtcctctagattggaattcagaatatgcttgctggcttacctctgatatcatctgagcaaatgtaattaatgaggtaccaagagaacgccacaggaagccaatttcattatcaaaacaggtatttgacacaaattacaagacaacgtgactttatccttcctggatttcatgttttcataagaggtaaacttaccttatatttttctaaacctgtgctacattcctcccttcaaggtggttaaatatttcagagcatggatgtgcatcttgttatcttcttccaaagctcaacaggacatgtgccatactgttaaaaggctattatattttagcatcttccaataaaaaattgtgatgtgaaaccgattattaatgctctaaggctggatacatacaggctgcctaaaaacttatgctgtactcactactgaacagagttttctgttgcttattgtaggaggtttctgtatcagcagccatctattttttacagacttcaagtaaatgcttaatctcacttagcaaactcacttatatgctaagtaattattataagtggccaatcatatgttagttaaaacattttaacagaacccactctgtctaatacctaaagagactgtgctgattttttactcagatcaaatgcataatgccttatgagcgacctcactacaaggcagaataatgcctccattggcacataaccagtgctagtagcagtgggtcctccacctgtcattggatgtgtgataattatttgttaaacccttagtatgtggtatgttccagacactctgccaagcattgtgtatgaatcctctttttccaatctcataattaaccgtattctccccattttacagactaggaaactgagcatcaaaactactaagtaaatttcccaagaccaggaaagggctgcgtctcaaattagttctatataattccaaagtccttgccataactaatattcatttctggtggcatgtcacagttcttttaaaatgttgttaagagcttttctaaagtgtagcaaccattatattgttaaaaaaaaaaaaaagttcaaacctcagaaaagggtcaaaatagttcaattaaatacaaattgctatattctaaaaaacaaaacaaaaaacatatgtacacacacacacacacacacacacatatgaaataccttttgcttgtgattttgttttctgctgaactcctagtagaaactaattttgttgaataaaaactggttgctgggaaagttgatgtcaagttgaccaaacaaagataggcttcttcctgcctctgggcccctggccttccatttcttagggcatttgtaatttcaaatactttatctgtccctttgatgtgtaaatatggaggacttgggagccatctcttcgtaatataaacatcagagaagatagcgcccctatctcctaatttctgtggaaagggtgggagcctaactttagtgggctccatgctccaaactgtaaaactatccccctgtcatgaaaacatgagatagtttgtttacatttcctttgggtgaagcccatttgcaagcacagttggtcccaaatccatccatcccagcacttaaataccctccagccttttttgtttgtttgttttcagtgagttgccctcgggctgaaatctggcccacctctcctattgcaatagccttgactaaatcttccttgcctgtttaactttgttcaatataatttttattctgacattactgccttcagaaaagcaggggaaaagtgagtaaaaatgatgtgtgataaatctcttctactttaaccatgtactacttatttttattccagtgttctggacaattaaatttatatggaaaaaacatttcctacaccagcacgttgcacactgaaacccagctagcacatcagtttccaactccagctgccccatcccgcacctgaatgatgagctgggccctcagcgctgattctagcctggtacacaggagatgctctcgatgttccctcaaatggaacactcattgctactgtttttctggctgcagctcaaaatcctccattttgacagcaatgtgttggctattacggactaattaaagtcacttttgaataattacataataaataacacacatttaaatgtagaacaaaattattttctaatcaagctctaaaaatatgacccagcaagacagtccttgaaatgattgtgatgacttatttaatgaaaaggtgcaccttgttcaatatacatatctttattcctaatgtgtttaatggtatcaattgaatagaaatcccttgaccttttctcaaaatagcacactgaaaaaccactgaaaattgcatggtaattgcaacaaatttagcttaatagtaatacatgtaaagaatatgacatgaaattatttaaatgaacttttgaaaaatcgattctatatttgtgaggtgcctgaattttagaggaaaaaccttctgtgttccaagaaactataagcccaccttttctaaactagagaatacaccagctctctcatattacatgacataacttaatctctctgaatctctttagctatgaaaatgcttcatagtttcataaaataatgagatagaataatgtttgtaaaggactaagaacaatgatggagcgcagaataaatcttcaccaaatactagttattattgctatttatcattgcttatgtaatctgaaccttgatcaacatgattcctctgataggcaatcaacagttgtcttttgagtggttgtactgatgacctcacctcctgtgttccagctaaagagatgccacaaaaatgggtgatccttttcttcccccaatgactaatgagatattttattattcaatggaactcttcttttcctagttttacaaaagtttaattgatttgagagtggcctaatatcccattagctatccatcccctaaccactcacagagaattgacgtattattcttagcactgtaaatctaacaggaaattgtccttcctaaacagggctccagaaaacaggaggcaggtctggttccctttgtaacaaatgataaattagagttatttattagggagctactacagcaaagagggtctttatcttcatttaggatcttgaatatcaacataaaactcacctttttaaaacttcttcaggagttttcagaaagggttctatttggaagagggcccccaaactaagagatactgacatgattaaagaccttcttggaacttaagtggttttgcagtgttgccattttgtcaatttactaagtggatctaaaatgtaaaatttcaaagacattttataaaaacttatatttgtgtgaaaaacaaagtcttggaaaatatgtgcgtgtgtgtataaaaataacaaatactaataacaggaaacactcatatagcacttattttgagcaaaacattttttctataacatacttttcatatattaactccagcaatcacatagcaataactatgctggagcaataactccagcaatcacaatttttttctctaggctgagaaaaatcacggaagctgtaaacgttttttgagaaaaattatgaaaaaaatgttatctatctctcatgtgtctacgcttcttaaactgggcactttaggacaacactggcctgtaacattgttaccaatagctggttcaggtttctacctgttcactaagagctggggttcaattagccctcctccatcacatagccaacattttgtattctgaagccatccttttgtattctgaaactgatcatatcaatgtgaagttatcatccaatgctaactgtgcaggacagtgtggctaaaatcaagtataattgagttccatgtgttcccacccaggatgttgaccctgatctagttttaacatgcacagttcccatcaggaggcctgagtggtttcatcagttgcccaccaattttcagccaggaaaagtaacagcattatgtaaaagggaaaatagcttggaatattctttttgtataactgaattgggggaaaaagccaccatttatgttctacattatgccagacattgcaataaatgtcttcaatatattaattaatatagaactgaaggtataaactttctatttttgctcccagagcttagcagagcagtaggtatatagtgacactcaatacctgatcaatgttgaagctgataacccaccaaatatataacttccctgttcattaagagttctgaatggaaccacaggtaattccaatttatcaaacatttgataaaaggaataatttactagtactcaagatgatgctagatttttcctgtttcttccattaacagctttaggaaggtacctaaataaggaacataggacattttcagagaaaaagccattttttgaaggtgggggagggtcagagtgattagaaaactcatgagtaaatacttagggagagtgaggtactcagaagatttgggcaacgcatctataaaggtaatggtgcatctccttacaaagatttgctctcacttgcccaaggactagcaaatgtgcatagaagatacatctgtttcagaatatttacctcaatatgttagttttataaaaagccagtatcccaaaatatagcctaatatgtgaaataatttttatttaagtatttctaacatctaatagcagcagctagaattatccaatgtctaataacagcagcagctacaattattgttatattattttatgtttgcattcaagatggattgcaagcaggaaaaagaaatttaagaaaaccagtacattaggaaacaatgacctgcaggaggggcagcccatgatgaaacattattcagacttaaacaggattcaaaacaaaaacaaacagaaaaacacaacccatattccaagaaaaaagttggaaaataggaaaacatcatataaactaagaatttcattagaagctatcacataaataaaaccaatttctgcccaaagagccaccttcatatgaagcattaaagacaggcttgagaaaaaaagtaatagggaggtggacagaaaaagctaatgtagaaagagatttaacatcagaaatcgaaagtgaaacaatttatggcatatattatcaagaccgggggagataagatcagaggacaggtttacagtgaatgatcccattaacacaaaataatctgaagttcttgttttaacaggaattgatgaattgaaaactgaagagtgaggagggacaaactgaaagagaggagaaaaagttaaactaggcttggtacaagagtgttaaagtagctgtcgttagatagaatcagtagctggtgtgttttgtattttgggtaacagactttggtgcagtagaacagaactaaaattgacagaacaagtccatgcaggcagcaagaaaaacagggttcctgcttcatggaatttaccttgtggggagattcaagctatacattaatgaatgaaaaacaaatacgtaaacatgattgtttcagatagtgatagtgtggtaaagaaaacaaaggtagaaagattccctggagtatggcaattaataagctgctactcacttttcattgtgctatgatatttaacaaagcagacaaaaatcgggtgaacaagcagaagacgatggcaaaagggttaccccatccgccttttctctcctctcctctaccttcttcctccaccatcttgttcttaggtctagtgtcaccagagcaaaagacagacagtaaactagtccataaggaatggttaatcagacctataagcaatggctcgaagaactggatcattcagctgagctcacgaagaaaaagtgacaattttaagtgcaattagttactgtgattcactaggtactcaaggtaaggattctgcaacaagagtatgatagcctatacttagacagtaaaagagggattcagcaagtcctgtaattagtaagaacttcaacagttttcatcgctgtattaatactgtgtaaaatactgaaaaatggattaccctgaagaaaacactaattgagaaaacaaaatcaactataaataacacacaccccaatatacaaagaccagactttgttacatggataactcatgctagaggatgtcagagaagatgagatagaaaaaagaatgtcctggtgcaaaagattaacaccaggaaggttgggcatgtgagcgtagaagaaatggggaagggaaatttgagggtgggaaaatgcagagatgggactgatataatgacagaaaagcaatagcaatgactttttttgttgttgttgttgctaactaacagattaagcataccaatgaaaaccaaggcaagatcttagtaaaggggcctaggatagtgccatgatgtgactttatctgtcacgacaaccaagagggaatgattgcagaggccaatgagctgggagaatggaatggatgatcgtgacagagctgatcattgtgaatgatagatgtttctgggagctgagagtcctgactggcactgtggagccaagaggaaagaggaccagagcatacccagcctggtctcccacgccctgtcctgttgcgaggtgactgccgagctcttccccctccctggcactcagcagctgctctctaagcgctacagtcagtggttacaatcagtgggggaagtgatattcaaatattcaaaacgagatgcacgacatacatcccgatttgctctaaagagcggatttactctaaaatggtattcttcacaagaatgcaaattcattactttcttgtgacatgaaattctcctgggattctaggtgatgtcaatagacaccactagcagatagtggttagtccatatccacctcactcattttgttaatgcaaacaatattattattattattattattattttattattattttgagacaaaatcccactctgtcacccaggctgaagtgcagtggcgtgatcttggctgactgcaacctctgcctccaagattcaagtgattctcctgcctcagcctcctgagtagctgggattacaggtgcacagcaccacacctggctgatttttctatttttggcagggacagggttttggcatgttggccagggtggtctcaaactcctgaccgcaagtgatctgcctgactcaggttcccaaagtgctggaattacaggcgtgagccactatgaccagcaaagaacattattgaatttaaatactgctttaccaaaaaccaaaccaaaccaaaacaaaactaatggaaatgagcctaacacttgaagttatgaatatttggaatcaaatctaggctatgaattcattcatttttcaggggtctacagccaccacttaatggtataagggctgtatggtaacagtatttacgttagtcacatcagaagatgcaaacatatcataaagaagtaaaatgtttcagcttgaattttagggaaacatggcaagactcaaatatttctctattaaagatatcaacgagtctacctgctgtttgttttactactgctataatactctcacttccgaaattcagaaatatatcacttaaggtaatttgctggcagagtgagtggtggggactttttgtcagtagaaaggtcaaataattttgcacaatgtgctgcaaatttttagctttataattttactataagtgacccaagggaaagctcattatattgttacacacaaaaattatgttgtgagctaatggaaagtgaacagtaaggtagaagccctgtgtgctatacccactgctttttctgaaatacataatcttggcatgttttgtttttaattttttcaataaatgtggaaaaatttatgtaaaaaataagagtcctcatctcacaatcaacgatggtataggagggtagccttctatacatgaatataaggcccttctaaggaatataacatgcaacaaagatttacagtaaagccaaggaagtaagaaaaaaagttgactaacctaacccacctgagctcggctcacaggggtcaatgtcctcatcatcgctgggacactctgctgaggccacaaggatgtcatctgtggtctgcaaaagaatcacattcagtagattaatttaaagggtcctaacagattctctcatctttgtctcattgacaagtgaaatacaatttgtttatcaagaaaccaaattcactatttccctttctaaagacacagagcttacattttagatccttcatagaagtaactgcctatttgtgaaaacttgattacactttagtttacatgaggacgcagaaatggtgacagccaacttgtagatacccatccactcaaatgcagatagaagctgcacacagtatcatacagaggtttaaaacaacctggcagaaacagatgatttgaaatttattacagcctggagtgctacaatgtatgcatcagtgggctttatgtagtacttgtgcttggcttcctaaaagcagaaaagccataaccttttacactcacgactatgtagagtttgatgaatctttgagatatagcttgttattggaggaaacacagattaagtagagaattagatagctctttcattggtgcaaaaaggcaaggaaatacaatccatttaagacactttcattttcattatgatttcacacttgaagctcatttttgtaatgttcagatagcaggtattgcttcctcatcatccctttcatcattatggtttcataataaatgaaaagtgtattcaaagtgggggaggggaagaggtggcagttttctctgtgacattctagttgcttcattgcgcttacagcaaaaaagatacctatctctgtaataaaaagcagagtccataaatcctagcagttagtcacataatcaacacactgataagcacgaaaagttgttctttattgccactgacaagctgcagtaaattcagcatagatattgcatggaatctgtaaaggcttccatcagagttggctctgctaaggtaaaacagagaatccaatgtatacaaataaataaaaatatctcattacatctactaaggactaaagagattagaattgttcaaacaattctcagaattgcaacattgatacagttctcatttaaaagtggaattaaaataacataggtcttacttcaaagaaaaagcaaaaatacgatatgagcacctaatattaaaggagcacctaatattgtcacagattaaagtataactaaatttttaagaaagttgtggcattttgaaaaatggagacgaggggtgatgaacttttatagaaagtattaggcttaaaaatctttcaagtgcagagtctttaagaacaaagaatttgttcagatgcgaatgctttacaatataactttaaataaacacaaacctttaaatagcattggagatggtttcatgttactctgctcttacttcttctgagacaattgggagagtttctggattcatgcattttgctgctgctattttagaaagggaaggtgaaaatattggtttgcctggaagtgtaagtctttttttttaactgttgaatttattgacaaagttattcataatattctcactttttattcttcaatgtttgtggcatttgtagtgctaactcccctttcattcctggtatttgataatttgtgggggttttctctttttttttttttattatacttttagttccaggatacatgtgcagcatatgcaggttacatatgtatacacgtgccatggtggtttgctgcacccatcaacctgtcatctacattaggtatttctcctaatgctatacctcccctagacccccaccctccaacaggcccaagtgtgtgatgttcccctgcctgtgtccatgtgttctcattgttcaactcccacttatgagtgagaatatgcagtgtttgattttcagttcctctgatagtttgctgagaatggtggtttccagcttcatccatgtccctacaagggacatgaactcatccttttttatggctgcatagtattccatggtgtatatgtgccacattttctatatccagtctatcattgatgagcatttgggttggttccaagtctttgctattgtgaatagtgtggcaagaaatatacatgtacatgtgtctttatagtaaaatgatttataatcctttgggtatatacccagtaatgggattgctgggtcaaatggtatttctggttctagatccttgaggaatcaccacactgtcttccacaatggttgaactaatttacactcccaccaacagtgtaaaagcattcctattctccacatcctccagcatctgttgcttcctgactttttaatgattgccattctaactggcatgagatggtatctcattgtggttttgatttgcattgctctgatgaccagtgatgatgagctttttttcatatgtgtgttggccgtataaatgtcttcttttgaaaagtgtatgttcatatacttcacccactttttgatggggttgttttgtttttttcttgtaaatttgtttaagttccttgtagactctggatattagacctttgtcagacagatagattgcaaaaatttcctcccattctgtaggttgcctgtccattctgatgatagtttcttttgctgggcagaagctctttaattagatcccatttgtcaattttggcttttgttgccactgctttttgtgttttagtcatcaagtctttgcccatgcctgtgtcctaaatggtattgcctaggttttcttctagggttttttatggttttaggtcttacgtttaagtctttaatccatcttgagttaatttttgtataaggtgtaaggaaggggtccggtttcagtttcctgcatatgtctagccagttttcccaacaccatttattaaatagggaatcctttcctcattccttgtttttgtcaggtttgtcaaagatcagctggtcttcaaagaactagaaaaaactactttatatttcatatggaaccaaaaaagagcccatatagccaagccaatcctaagcaaaaagaacaaggctggaggcatcatgctacctgacttaaaactatgctacaaggctacagtaaccaaaacagcctggtaccagtaccaaaacagatatatagaccaatggaatagaacagaggcctcaatgtaactcttaatgtcagtgaagatcgttagcaattggcacgataatcatgtaggtatctttttaaaaagaaagctttaaaagcaaagacccattctccttttggcacaactacatcttgctgggtaatatacaaacagacttgataatgacgtgttattgaattatgtagtcttgccggtcagttgctccaattccctccagaggagataatcagctttttgtttttttccccccggaccaacatctagcggaaagctacttttattctcaatttcaaattaatttcaaggttacagataatttctcattttctttgaggaatgttaaatatattgatgaaatcaatatagtgttgttcctattggtgttttattcttgttagagggaggaggatataaataaattctttaaaccaatggctctcacatcagcagtgatattgccaccttttccttcctccacctggaggcacgtttggtaatatgtggaaatatttgaggtcacaattggaattctgaggtctgctactatcattgtctctttttgactgctaaacattcttttctttcctcttcctctcttctccttctccttttttctttcttttttttttctttttttttttttttttgtagagataaggttccagctcagtctcactgtgttacccaggctgatctagaactcttggcctcaagcaatactcctacctgagcctcccgaagtgctgggattacaggaatgagctaccacacaatgcctaaatattataaaatacacatgacagcttgaagacaacaaagaatgatctaacctgaaatgttaataatgccaaagttgagaacccctgctcaaaacatttaaaaacagttctgtcttattgttctcctaaaaatatggacagcataatagtatctattgttacaaggatgaaattagtacatgaaaagtacctagaaggggacaacactgtaaatgtttattaaaactttcaatattattatcaacttttttcaatatttcatgaatgtaataccaatttaatttttgcactataattacaaataatataattatagatattaaaccgaaacttgtacatatgaattattcttgaggtctcatgttaaaatttgtatcaaaatacagtagctacattggtattttgttgaactaagtaccatcttttactgtccaactttgaccttttaaaaggcaaacatcaaatataaacttaaaaaactgcttcttaaaaaaattcatgggctacaactgtgtgactcagtgggtagtgtttcatgcagactaaattatttacgcaatacaagttaagctttgttttaaaagctgacctattttcttttggaacaattctacactaaccagaacgtgtgagaatgttctcagtgttaccttctgcaaaacacaattcctaaaataacaaaagatgtcatacaatggtacttcctatagccctcttacagtagaaaaaaataactacaaatgcgacccttttgtaaaactatattttactttttaatgtaatttccctggtataatgaaatacgttcttgattttcatatatgtttttcctccagaaattaaaaaccagcaacaatcttgagaataaaagacctcaaatcaatagatggcttggcaaaaatcatcatcgcagtatgaaaaatcaggaagtggctcaagtgtaggggaagaaaatcaaatttcactttagaagctgaattaactgcacaattttctagccaaagctgtgtaatttaaatttaattcactgtgtttggagctgctgctatgacttgctgttgagagagtggtagaaagaaactcaaatatgtcacattaatcaattctattctttagtatacttttccctgatgtttataacctttttgagaaaagagacaacctgctgaaaaagacagaagcgtgatcaagcagaagcattagctttacataacagtccatttagatgagtgtctctaactgtgcatttaaccacccacaggtgaaattgctatgctgatcttccttaattcagactggtctgtacatgcacatcgtaagcatctcttcttgttgaaaatgtgcactaaaatctaagtctctatacttttaggaagaaaatgatttgaacagaattcaagaaataaaggctgtaaaacttaatccatccttttctatatttgaacaccaatattttgtagggtttgagaaatatgtcaggacgggggcaaaagaatgttcttaatgaatggtaagaaggtagaccaagtgatttaatacccagggatattaaaaagagggagcatttggttggggggaatttagagaaacacagatgtatgtttgttattttttctcacttataggaagccttttatttttcaacatcattaatggtggaattttctgtatatgcatttgctgtcactttaaaaaatatagcttaactgcatatctgtgtggtaaaaatatacaaggaaagcacgaataaacccagtatgtaatattatatccctgctaagaataacattccaagactttattccttatgataaacagctttcctgaagactaatatattccaatgaagacgcttacagaaaactatactattaagacaaatctgttttgtaaggaaaagagcaatttccaattgtaaaataggatattcattgtcagtatatgatacccacaaataaacccgatttattctaaaattttaattgaaagtttatttctaaacagcaacagtgtatcctgctatacctctaaatacgaagccaaaagaattgtctcagacaatgacatgagcattgtataacattatttagcctaatatttaactgttgtgactgatatttagactgaattgatagcaacagttagtgggtcgaggacagtgctggctgaaatatgatatctttggttaactgatgggcacttgttcttgctgatacttttctgtatgcaaagctgctttggaagagagagcgctctcaagtgtggttttcatgaatgaatctaatagtttctccagaaaatatttatcactaggtgaggttccttgaaaaaaaaaaattttaacaggattcaggattagtatcacaaattcccaagtaaggtccaacccagtgtcctgataacctatggagcaagaagtttctaggaggtaagggaagtcataattctcaccagaaggaaaaactgcagaaaataatccacttgtaatgtgtatataggtatatgattcccaaattgcggtctatttgattaaagcaaatcagtaaagaaatagatcaaattggcaatttcagttaatgaacaatcctattaaggtgcaagaggaatttagaggctgtctagatcttattcttgtttccactgtctcaatgaagttgcctcaattgacataaagatgtcaatttcatggctcactatttaataaacataaaaataataagctgagatccagtatgtggaggatgaattttacctccagcacatgaataagaaagacagtgaggcccaattactcaacaatgaatacaaagcacctcatctatgcgtagcattttctgataggcataaaatattctcagtacacatgaaggtataaattgtggttccgatatgcaaataatttactgttctctctctgttctgaggcaaatgaacaaataactctttaatacaaataacaatgaagtaaattcaaatagcttatttttctcggaatgtaacaatgttcccatatccattacttcatttacaattcaccaatagcatccttatctggaatgcagatggaggtactgttattcagagtgttatagttaagtgtctgctaaaaaaaatactcatctgtacactcatctacccaatttgaatgtgtgaacactggctttcatgaatatgtagggcaaagctcaaataccccttaaaacagccactttcacatttctttaatgttctttcccaattgatgccctaggctattacaaaaagtgaccataaatcagctgtctgcttgggaaaaaggcagacttgaaagccattcaattttcttcgaatttttttcagctgtttaaaaagtatgcaatggttccagaaccactaaagtgggtttgagtagaagaactctgccgtggtaaagaaatcacatcttactcagtctaacgttcatttttatgtacatttgatactggttctcctaacaggcaaaactcaaaggaaaatataggaatatggaaataatgtcacagaaatgcactttaattaagttatggggaaaagaataaaactgaatttttgagtaatcaaaaaataacatattttagcaaacttattcaaaatagaaaacctacaaataaggaacctgctgtcagggaacttgaaattaaatttatgtttaaaaaatatgttttttattatttctttatgctactgatgacctctatgctcatattgcatttccatttttagccaaggcaatgtagaaggactggcaaaataaattaatatgaaatttaaactttcaggaagccatggaacaacctatttttctgaattctcactaattagaatttgagaatgtcagacctccaaagactgctggtaatggagtagaggtactgaatgagtgatcaactgtgtttcccgtctctttgtttcgcttttggacaaagcactttctgaaataattttggccatttccaaattaaataaatattgaaagatgtttacaaatgtaaatttaggcttctagctgtatcagtatgaatatctagtcctattatggattagtcacacaggttgaaatgaaaagtagggttctaagctgtatcaacatgagtatctagtcctattaatggattggtggactaattaatagattaattagtcacacacattgaaatcaaaatccctttcggtaaaaggccaaaataaaaccagactttatgattgcaaaatgcctatgatggataatttcaactagcatgactccaaatccaagctttcattgttgccatgttagggaatgaaaacatgttttagttaagcagtcatatatcttcttgtactgagtcagatcttagagatcattaatctaagctcttcattttacatattgggaaactgaagctagaaaattttaattggccacagttataatgctagttaatggcaaatctatgagattatccgactcccagtagattatgtttttctattatcccagatgacttctacctatccattcatctatccatccatcccaaaccatcttgttctctaatgaattttatgtgatttacgaagatacatgataagataaacttaaaataagtgaaaaggttgcaaaggtagagtactggattttagataagtaaccactaaaattgtcctgaagaaatacacacagacaggaggtgcatattcacagcttctgcaccatttgatatggcagcacatcatgtaacactaaaaggggagcacaattaatgctagagttcaacttttaaaaatccaattacagaaattcaaatattgacataattacagttattttgaaatggagttaacccagagagttctttatttacttgtgaaaatcttttctgaaattattgttttaaagaccttacataccatgccctcagtctctgtacctaaatgcataactaattttttggtgacaaaaagaaaatgcaaattattgaatctctttctgtctttttatctctttgacttagaacactgcaggctatgctggctacaaaattaaatcaatgaactccctgctctcttctcattaagccactgattaaaatccttccaacttccaaggtctctctcttactaactactgtcttcacaatgtaagtgccaatgagatattcatctttgtttctctcacacaactatcattagagttctgtcagattatttcttattacatcttgggaataaatacatggaagtgatcatttattagccatattggtagtttctccagaaacaatttaaacatgtattgatcaactcagtcttattgacacaatgaccttcgaagtgaaggttcaagatcaaagatgtagaaggagccacatttacctttggacaagcagccagttataaaaaacatttctctgctactgggtagtactatgaccaatgtcacctgataaactttaacttggggatagatgagaacttccattccacacgatgcttggagtatagaacagcaagaaatatggatgtggctggaaataatcacttagttaacagaaggtgtattttctgattttgagttgattcatgagttgaatatatgcaagactcaggactgcatgcccccaaataagccagtatctgagtagcatctctatgcttgtatctatccagtggtgattgagaataaacattatctggctcagatgtcacaatgttatcttgttcatgtgctaagaggatccagtgtcttctagttctagttaaactggaactccaagcttctacacttgactacttcattccttctggtgcacattggttctttaatacatatttacgatgttgtactgctgaaacacctcagtttaatttatactatgctgaccaataatgcaaaataaatactactccagaattcaagtctcacttttagttttcatgagcagtacacatcatcttggactggtttctgtgttctaaacatgacatatgaatatatacatattatacatttaaatacatatatttatatatgtaattaattgtgtctcacaggatgttaagggagtcaaatttcatatgtgtgaagacattttggaaagtgtaaaagtgcccacgatgcagtgtttgtataaattattattatagaaaacacatggacaccgggagggcaacatcacacaccacagcctgtcagggtgtgggggacaaggggagggagagccttaggacaaatacctacttcacgcggggtttaaaacctagatgacaggttgatgggtgcagcaaaccaccaaggcacatgtatacctatgtaacaagcctgcatattctgcatatgtatcccagaacttaagaaaaaataaaaaaattattattataactaataatttttgttcctcacatgatgctacaaaggagagctccggatagtgcttgaagaggacaacccaatgtccatttacctgaatacattttattttaatgtcctgaaatcctcttgtccctcagttgaataggatctgtatctctcacttacactagcccctcacacagatgctgttcttgggctgcttcctattatgccagcattgaattcattttggcattccttatttagggcatatgtgtggatctcactggtaacttacaaggtaggtagcaccaatctatgtctggcattatgattacctttcctccgaccagatctcctggagagcttagtgcacagactcagggatacttgagctctctctaaattctaagttctactcattagattgtgagaacctgatttattttatcactgcatccagaatttaccactctgttaaaactacagcatataaatgaacagatgaacagggaaaaacagaccacttagcaaacaatgctaattaaaggagagaaagagagagaaaaagggagagggagagagaaagactgaatctctaagtgtaattcatgcatgacaatgctccttacaataggagtggttgtatttgtagttataatatgactttacctatggtttgtcttctatacggattaataatatgcttatcaactcctgttaagacaatgagctatcttttcttagtgcattagaatagtgggagtacttgccttttgaaatcatcttgaaatctaaaagtatgaagactgcttagtgatatgttttattttatttcatatgctgcttttgggtacagtttatgttttatgcccccagggcatctatacaggaattcagtagagctgacttaaaatgacataatcactcaaaaacctggcttatattcttaaagcatttgcgtgaataaaaggattttttgaaaataattatgacttgaaaaataattgttatgaaaatacagcttagttaaaagtgagggattcatcttgactttaaaaatagaagaaatattatacatgacacttgaatttactagaatcatcacattttaaataatcttactcttgatggtcatccactctaagctcactacatttttggttatgaaaaaggcatgattgtcacaattgctcatttataccagctaattaaatctcaatataaaattgaacaagtatagattattttctaggaatacacctaagagtgggagatgagaattgtggcaaaataacactttttcaaagattttatctgccttataacatctctagaagtaacaatgaaactttctaactggcttccacattataccccatggctggaaatgtatggtagagaaatagcaaaaagtgacattatctttaactgaaagagagaatgactgaaggttagaaggaaggcaaagctaaaaatgtcttgcaataagttggtcttcctgcttttatgaagcattcctgtcctttgagaaagcagtaagataaagcctactctgtggaagggactgagaaaaacatagttaactatcattttgggttttttttttacctacataatattcctcaactatctctatctcttacaaactctcttgcaatagtctattgcattataaatgcttttacttagttgcaaaaaagaaaaaaaaactattcctttgtaatgttttccttcaaaatctaactacaggatgaaagctttatctttttcctgaaagaggccagccataagattcacaccaagaaatagtgtaagacagaatgcactaatcaaatctatatctactgattctgccattcattcattcatccatttgtactcatttgttgaatattttcatttaataaagagttatacaggcaaggaataaaaatacaattttctgactcagaacatttagaatactgtggtggcgcatgcaatccagtttcttttgggtttggagaaggcatctatcattttatgcattaatcttttacccatgtattaagtgttcacactgtatattcaaggttgcatccccagggcctgccacagtacctagcatgtaagagacaaatatctggccaatcagtcagaaatgattccagccagtataatcagaaaaatagaagtaatttgataggaaaaataagtccaacactaccccatcatgctagacaaaacaaaagtaccttagagttttacaaaaacgtttccaaatgcaagggattgacagaaccaaagatgttctatgttctctgatacttcagctatcagctgattagaaaaggtatcaatttgaaaagcaacgagaagcattgtcatgttaacttttttggaaaatgtgactgctaccaccattcactgtaaggcaatttgtgctccttcatttttacaactaataaatggtgccagtgtttatttttctccttttccctttgatttcatttttttcatctcttcctatttcattcatggtgtcccaactcccagaggagctacctcaggaaaaaagatctcacatagcaagaaaagtccaaggagcaaatgctgtttgactctaaccaacataccgtagcaccttaggtccatgtataaatttagggaagagaattacatgctctcttccagttattattatatgattccataagtcaaagaaatctggaaatgtttctatgagtagaaatttgtgataaaggagatagtcttttttactctgctaaaatattttttggtacaaggaaggtgccctgtatataactgttgatttaatttgagatatcatgagccctgacacttgacttttagttctccaatttaagttactaagctgcctacattcgatcaggataatttgccatataatcatgaatgggtaggggaaattggcagcttttaacggttctcaaaggtaattcctaagagaggtgagttggaactgatgaaattgagatagatgctaagtgaccaggcatccctgctttgaattgtgaaattgaacttcaatgtgtaacaaatgcaggccttctatgagcagcaagttgctttttccactactgagcatggaaggagcatgaatgttggagctgaacagactggtcttaaatcccagctctgccacttactagctgtgtaaccctgggcaagttccccaacttctctggatttctttcgatgtaaaagtgaagttatttacacctattttgcatgagtattacatgtattaaattatctagacctagataggcatactatctagcacagtagctggtatatggaagatattatcatgaatatttattacatagatacaaccagctttcaaaatgaatggctcttgtagacattttcacattattctcaccgcaatatggaaattaaactttattcctagcactggactccctaatctttagagacaaacacacccttcacagagaaagtacaagtttctcacctaaattcacacatccatgtttaaatattctataaacagagaagattatatgtttgataggacagcgcttgtaaaagcacctcaaaaaatcacattatcagtatattgaaaatacaaggagcatctcttctctctagctacacgatgtaatcaagcatttgtcaaatcatatttggaggctctttgaattatgtgctccagttcccttttaggtaaagagaaggaaaccctaaattggcatggtcaggtgtgggtcagatgtacagtaccaaattactgcactgcactgttcaggagggacttaggagtatatcccagtttcctggctctccatccagttggcgtcttgctccttctactcctcctagtttcatgtttgggtatggggcagataaaaataacagcgggaataatttactacttttcccaagtttcttatacataacttgactttttaaattcttccctatgtcttactgaaattttaagtaaggcctttgaaaaatactagggaatgatgccgtcactcacagctgccagactggagagcactcagtggctggtgcaaagcccagtaaaatccaaccaaagaacacaagtgcagaaacaggacaagaattttgctaattgtcttctttgagaactaggagcttcattagagaatttgcctttgtgcatgtatttaatgagatgggatatgctgctgaactcttcctgcaggtatttcagtgttttatttagttatgatattgcctaatgacctctttttttggtccactattcagacatttttgggtcatttaaaaagttgttataaataaacatcacttacataacatttagatttctaagtgattaaacatatcctctcttggatagctttcctcttgccagccttgcatttacagtctgtctcactcaattctgacatatttcattgcagttgttatcacgcctctgccatctgggtttgtccttttccttcccgcacacctctgcaatccccgcctgccctcttcccttcgttatcattgcttagatgcctactaattaaggacaagaaagaaacctattcaacataaatataccttttatcatcatgcgaacttacacagatgtagctttttaaacagttcagaagacaaacttttcttgatgatttggtgtcatttttatgagcacgagggctggaaacacagtagtgatctcaaagagtattgctgactattctccataggtacccaagttgctcgtttactttttagtctatgaaagctcaatctagcttttgtcttttgtcagcctttatagacctctttcttccttccaatttgccccttcggatctgctttgagctggaaatccagataatcaaagttctccgtcctgagaaatgagaaattggctataaggtaaaggatatcagagaggttctcaaatgagaaagcccaggtgcatgagagcactcagtcaaggctcatggcttaaaatacacaagacctgttagtttcttccaaatgcaaagttcttcgtgaaggtagtatatttatttctaagcgaatctcagtaatattttcactatgataattttcaaatgggcttttcttattttattgagtccaagcatccttattgaaacaagattccacatttctaaatttctattttccaagatctattcaaacagaagccaagcctccttttgtgttccactgagttggctgggagggagggaaatgaagatgaagtaatataataagaaaggtggctgtcttactgtcattgactgctttgctacctgaaaaactcgaaggtacactggtttatatttttacgtagaacctgatgcagccatgcaggcatccagctgtatctatccagagtgggtgattcacctggtgtaccctgaagagacagagaaatgctcttcacggtagcatctttttggtttcctaggaccagttgtttgcttgacaaattgagaagccctggtacaggttatgggatcttacaatgctgctttccagtgatctgctgcatgggcattggagtcagacttacccaagtttaaatctggactgtactatttagagctggtagaacttgtgtgatttatttaacctctcatttgtaaatgggagggatgcactgccaatctatgcagtagttgtagggattaagaaaatcatgacagatgatatacttaacactgttcctggtgcgtgataaattcaaaataaatattggctattatcaccttcattattattttataagacatacatatgttacctccagcatgctgaaaataacgtttcttaataaagtaggcaaaaccccagtatcctaacattcacaagaggtagacaatccacttttgtccttgcctagcatattgtgaagtggaaggggaaaaagccaaacagtgcatgaagaatgcaaatgtattttttttcctgaatgttctcttttgctttttgacttttaaactctactttatttcaaaacacagtcccaaccattccaaagcatttttgaattggaaagccttctttttttgtttcataataagctaactgcaggtgcaaactcaagggagacagaccttggaaattttaagtatgttgccatggcaatggtttgcaagaatgtgtatgagtttcatcttagctttcaagcattcaactgagttcatacgtggaggttcaaatcactaggcacacaatgtttgccactcattgtgtcctgaaaggtttggaaataactatctgtgttgcttatagcaaccagaaaccacaaaattctatttatttatttatttatgcaaatgtagagatctagtcattcatatctgctcttaggtggcctatctcaccagtgtggctgctctaagagaagctgtacacataatttcaacactaatcattttcaccattgttgcaaacacagttgtactcccaatatggagtagctataaaaatgttccactgaatatcacattaatttcctcattcaaatttgacagatccttccagaagcatgataattatttaaagatgttgcattaaagcaaaatttcagtctaatgaattgtggagtatttccttaaaagtgtctcatcctatagtggaagaaagaaagtgaaagcacacaatccagtcattaaattaacaccaccctccccagaaaaagcaccagcaccggcactgccaacaaaaagacatgcaaaaaacatcattttatcacatattactaccccagtggttcttaaatggttcagctaatgcttctaaattccaaaacctgcacactgaactcatgcttcattgacagaggaggcaatggttcttgacaaaagcattcttttccccataaatggaatccatagcatactataattgggtaagttttaaagctatctattgggtacgggaaataattattaacaaattctcttcaaattacaaggctttttttcatgtaaaatgagtactaaacaaataatatcatttttaattaaataaatgatttatttaattaaaatccagcaagaaaaagctggatttctaggggtgtatgttcttcatgttttctagcgaaaacttgctgcaaatgattcatcatgatacagcagaatgccctacataaaaacatggccacaggagaccccagtatctcctgcattttgttactgactgaacccttcacaaacgcattattagctaccaaaccctggcagctatttaaaattcgcattgttgctttaactttgacccatcttccaaaatgcctgcgcacgcatgcacacacacacacacacacacacacacatcaatctctcaatctcccgtcctccttgttgtaacattttgttgacgtacttcaaaactgcagtagagcttccctgccctgaccctccattctaagaagcttacagcaatgctggaattaaacaaatgagaacacaataattagctatgcaaactgtcaactagatctaaaaagaaaaacaacccagaaaacacaacaatcagcagtttcaagccctaacaagaatctgcattgaattctcatttattttaaacaaaaatagattaggccttttgaaaaatattcagtgaaatttctatggaaataggacaaattagcctataggtctttacatctctaatttctgtgttgctgatacagtagaaaagtccaacactctttccaaataaatgctcttctactctttaatagccagatttacttccaaaggtgagtagcaccaaaaatatttccaaagtggatatgaaacaggttagtggatcaaattatatggtgtgacaccgcagttcccaactctgtccccacaacctcaccctaatcattttatcaatggtaattaaaatataaagggaaactgtaagggaaaaataattcttgaaatatatggtgtggctgggtatggtggcacacacctctagtcccagccacctggaggaggccgaggcaggagggtcacttgagtccagcctgggcaacatagtgagaccctaacactaaaaaaaagaaaaaagaaaaatatctggtgtgtttgtggtatatgaaggggagggaataggtattcaattctttgggtggagagtattgattatataatttgtagctaaatctctcagtttcttcatagataccaatcaactgcctcctcacccttcgggaaccatcctgagttctgatgaagcaacatggattatctctatgatacagacactttgaatgaatactaatctaatgcttcaattgactgttaaatgttctcttaacccatttgcatcccgtaatagaaatttggatttttttaaattgagaattgtaatgactctgtaaaagttttgttgcttcaagtcttttatctttaaacttgctgaataactgcctactttataaattgagaatgtaatatgtaatgcctgaaactagtgtaggacaagaaatagtaatctaagttttgactaagagttctatgtaacccattgacctggggcaaatcactcctcatcctaatataagtaggttagagtagatgacctttcatatttcccatgcaatgatggagagtaacacaagggagtcctgtggtaacggtagagggtaatatcttgattgtggtggtggttacaagaagctacacatgtgataaaactgcatagaggccggacacggtggctcatgaggtcaggagatcaagaccatcctggctaacacggtgaaacctcgtctttactaaaaatacaaaaattagccgggggtggtggcatgcacctgtagtcccagctactcaggagcgtcaggcaggaggagcccttgagcccaggatatggagacagcagtgagctatgatcatgcaactgcactcagcctgggcaacaaattgagagcctgcctctaaataaataaataaataaataaataaataaaatgaaaacaaaatacaaataaaatgaaactgacaaaataaaacaggaaatatcacggattcactaaaaattaaatatccatatttatatcccgaggatgctgccatttctgcccagttagctacccctacaatgtgtaatcttatttttcaatcctcaaatcctgcagaatccttatttatctgataattcaattgtgctcaatatgcttccttttaacgtcacagaattcggtgaattttcctgacttccatgtggtcgaaaaataatggctggtgacttagaaattttactgctatgtattggcttcaaaatttgtctttcaagtgacaggaatggggcagaaaaagacagtagatgccactagcagagttctggtgtaggcaaagtagaagaaaagaggcaaaacaaacaggaaataactaagcaagagaatgagcagaaggaaggagaaaagctaagaaaagagttcctccacctatgtttgggcggtggcagagtgtctctgtccattttacaagtgacatctatgatacagctatttcatatttaggaaagtagaatgaatcacgcaatgagatgtgaaataagtcttgattacagtattctagaaaggggcttaaaagaagcaaaagactttactcctggtaaacaccaaaccttcagacacagaacagaaatgtgccgttagaagatccctctcacccccatcctttaacatctttcaccaaacaaaacagggtaaaacaaactcaggcagtttctcaattactttcattaaaatgtctatgaacggtgaattaaatgacgaatctctttcagaacccattaatactttttccagagctaatactatcagtaaattttaaatagtgggaggaattattataaaagaataaaatatgtaacagatgctgaatcggtcatatgtcccagagctgctgtaacatacccaggcccgtacttcatgtgtccataacgaaaagagctggctgagaagttatgaggccacacctcacaacacctcaccctgctctctccctagtcccacagaggcacaatgcttctaaagctttgaagcctgaagttcagggaatgctttaaagatgaagtgtttaagctattttctggaagccaaatctatcattttaagattacattaaaagctacacttctactgttcatatcaatttacgctccaaactgctggtttctcagagcatccattgaatcctggtgggaggtaaatagtttctgtttagattttgacagaaaattaaaatttaaaacataatcactacatcttccatatactaagaagtcttcggtggctcatgctgtaatcccagcactttgggaggctgaggtggatggattacctgaggtcaggagttcgagaccagactggcaacatggtgaaaccccgcctctactaaaaatacaaaaaattaatcgggtgtggtggcgcacacctgtaatgccagctactcgggaggctgaggcgggaaaattgcttgaactagggaggtggaggttgcggtgagccgagatcacgccattgcacttcagcaaaaaagccaggcctggtggctcacatctgtaatcccagcactttgggaggctaaggcaggtggattgcctgaggtcaggagttcgagaccagcctggccaacatggtgaaaccatgtctctactaaaaatacgaaaaattagctggacatggtggcgggcacctgtaatcccagctactagggaggctgaggtgggagaatcacttgaacccaggaggtggaggttgcagtgaaccaagattgtgccattgcactccagcctgggcaacaaaagcaaaagtccatctcaaaaaataaaaaataataaagtcttgaaatgataaatgtaaaagttctttattttattttttgagacgagggtctcactctgtcacccagggtggagtgcagtggtgcaatatcagatcactgcaacctctgtctcctgggctcaagtgattctcccccttcaggcccctgacaggtgcaggtgcacaccaccacacctagctattttttgtatttttggtagagacagggtttcaccacgtttcccaggctggtctcaaactcctgagctccaatgatccacctgccttggcctcccaaagtgctgggattacaggcatgagccactatgtccggtttcaaagttctaattacgtttccttgtgtctaagaaaaaattttttctgcctaaggtttctaattattatagacaccagcaggctataaatatgtatatatattttgagacagagtgtgcctccgtctcccaggctggagtgtaatggctccatctcggctcactgcaacctccgcctcccaagttcaaacaattatcttgcctcagcctcccaagtagctgggtttacaggtgcccaccaccacgcccagctaattttttgtatttttagtagagacggggtttcaccatgttggccaggctggtctcgaactcctgacctcaggcgatccaccctccttggcctcccaaagtgctgggattacaggtgtgagccactgcgcccagcctaggtttttatatataaattgtgaacagtcataaaaataatttgtcctacacaagtttttgtgcctactatagactttcacactgatagaaaaaaaaatgcttacaaagcctttttctcagaggatctcatttggcagttttgaaatttacttttccacaaatctttatcagtggtaagaatgtttctgaggctgtgctgtcaatcacttatgtcaccactttccttcccacttcattaggaaccacactgtactttatttcttaaaggagaatctgaaactgatttggggaagaaggacttttagtccagagtatgcagcattgtataaaatatgtattgatataaagcctaaaaatacacacagtaggtacagcattcacatacgcaattatttagcaggttcagctggtgtgattttacaccacagtgttcttcttacgaataccagagagaaaatcaaagtttcttgacatatggtaataaatattttcacttacagtaaataatttttgctcttttggcatccattgtataaaagctagtttgaaatcattccaaattagcaaagctagaagtttggtaacacaaggggaacgagcagtataggcccccataccttcgttttcactgaagtgtgcttgcttttgagatacaacactgagaaaacttcctcattttcaagatgaagagatgttatttcttcctattgtgtttctaggactcgaaatgagcatctgtattcttcattatggaaatggaaaatgagtttgccctataattaatgctagacatgacaatttttctggcactaccttcaaaataaaaattttcaatatgaaaatctcataagaaaatctcagatgcagattcatctcaaaatccaggtgacataattcaacaaaatgaaaagcagcctgtttataagaccaattttctttaaagcatttcttttttttttttaaggaaacacatttattcacactctaaaatcatgaaatgttagacctgcgaactcctcaccttacaaacaagaaaatcaggtatcagatgattaagccattaagtcttcaccagtagatacagaactttctccagtacaatgtcttcacataaatcaattaaaagaaaatgctctaaaattagataagctccaaagagtaatctgttcacactgggacatgttgaatttgaggtgaactgatagcagttgtaagggtaaatctgaagttgagaagagaattctgggctggggatcatatagatttcccaacgaaaccaaaagagaaaaggagattctgagaccaccttcagaaaaatccaacatttaaaagggtagaaagaaaaagcaggtacaaacaaagaactgctttcctgttaattgtttttactcctaaaatatttgattgaatgtttccaagtggaaatctgaggagcccagtgaagaggattctcttaggcaattggtggattctcttaggcaattgatcgaacccagtgataaatttcccaaagtagtcttatgacacacagtgcatctatgacacaaaaactgtaaagtaaatcacttttcaaaagtaattcaccttaaaaattgattaaaattaactgaatgttaatttcttagtattgacagatatacaacggttatatgacatattcacattagggaaaaatgaacaaaaagaactctctaaaatatgtttatgacatttctagaatctcaaattattctgaattaaaatatttatttttaaaataaagcatgctgatctgattaactcccatatattacatataaaatgacaaagctgtgatatttataaatacattctcttttaaaaaatgatggagatacattcaacaaagaaaaatacaaccacaaccaaaacaagcaacctacaaattcctccccacttttgttacgtttatagacataaaacatgcattatccttgtttgaatggcatgtctttgaaaatgtcctcccattttagagtttcaaataaaacaagcatatacttttctacttaatctcatcaatttaaaccttcatatcttttcttaaagtactgcaaagagtagatgcatcatttagggattgctaggtagagtgaaataggctggagtcagtatttattttgttattgcaggagtagccttctgtttaaaatgacaccttctcttgcaattgaaatcttactggctatgtggaaaactagaaagtcaggaatctagaaaacacttgttgcagtggatgtcttaagaagtgtcctcagcttccttttctctagcctgaggttttgtaaagcaatcaagagctattcagtttaatgttttatacctaggtatcatttcagtcagttttaatgaatggttcacaaaatatcccataattcttcaccatattttaagctgcttactgagaaaataatactattgatgaccattccagtatcaagagtaaatggtttacataattattattacttattcaaaattgtttcacctaaggccagattctcatttactgcccagacccactcacactcacctacccactccatcccaccaaaaaaaaaaaaagaaaattaagagctggcgaaggaagtagaataaggcaaacaaagaattattgctacagcaatttataagaacgctcaattataccctaagggtctgagacagttatgcagttatgccaaagtgtccaatttactttttctgaagaaaaacacttagcaacaatggctaattttaatgaataaagagaatgaatacaaactaaatatgcagatgacttttaaacaaaaagttgcatccattttgcattacttttatatttcataaagcatgaaaccggcttttaagaaatcagtatgttgtcctgagaacatgtagaacaataggaaacaacccccttgactgattttgagacaagctacttgggtcctctctggatattctagtaccctcggtgtccgtaatgccattttagaagcaggtattgatattaagggatgtgtagcctacctgatttgacctgattttgtgttaccttttatttcgtgactggataactagtgctgctcaaacacaggaaacatacagcgaaataacatgaatgtatctccttgaaccacattaaactctcctttctccaagctaccttgaaatatatagaatacaatgagcaaatatattgacaagacaatgagcaaatatatattaagtaatgctatagggtaaaatagttaggccttcagtgctcctctagttttatgcctatttgtcttgaatcctcaattgaacttttaaggcagcaagtgtctcatttttctttgcataacccatgacatctagcagtgttctggcatagatacaatcatgcagtacatattttaacagatcttaactaacaatgtacaaaagcactgagaggggtgcttagtaattacttatatattttaattttcaacattctggaaagagatagtaaaattcctaaaggctaagaaacctcttggcaagtccaacagtagcttatccccggccaaatttttggcttgctatatgtacttttaagcctattagttaatagctacatgtttaacaatgttttacatagacacacattttatacaaatgttgtagtcccactacaaatctaaagagtagatgatccactcaaatctagctgtgctaatggagggatgcatggtatataattaaaacaatgattttgaagccaatggagggtaactggtccaaaaagcacatctaatcatgcaaaataattcattatgtagacagttcatacatggaaaattgagaattgactcccaaggctgtacatatgcaacttctaaataaagtgctttaaaaaaatcaaaattctatgtaaaaggtttgatctgacaataaaatggttttgaagtcataatggcagccttagttttatatatgtaattacaccttattataaatacattttattacatatatataatctatacatttgcatataaagtatttttttcattataggtaaattcatttcactggacgactgattaggaaagaattttgtctttgatatactctcccatccgagtactaaccaggatcaactctgcttagcttctgagatcagatgagaatgggtgcattcagggtggtatggccgtagactgatatactcctgtagagttttcaacttgaacgatgttaagtcagccaggtaatggcatttccccatactgttaagccttcactgtatccatgactttactaataaatttaggctgtgaacttatgtaatcatgttttccatcaaaaatctgaaataggcttagagccaagatggtggaaccctacaagactcattacattttaataaaaaagcagggggaacaaaggtgagagcacaaagactgcagaactaatttctttcgggaactgacttattttggctccccaaaataatattcaagtcattcccaccatgataaatagtttttgtctttcaaagtaatgaataaagtaatggagactttataacaaaaggctatacattatagtcatgggaaaatagtaaaacaagtatttgaatgttttttattcccaagaagatgaattgtggcttaacccacagatcaaaaaatatatagcacaacactgaaaaaaattatcattgatttttgggaaatctgagctagttacttatgattaatcaaatgaattaaaataaaggtgaaaatttgaggagcaaatggaaacgggtagtgataatacacatagtttatgatgcaaaaatataaactatctctcatatatttctgctttttaatagttgttactcagtttgaactcatattgtctttaatgtgccaaaagaccctagatatatccatgaatgtataattgtctgtgactctctccaatttttctgtatactggaaattgcctacctactccacaatattgtccttagctccattctctatgctagagtgatgagggaaggaggccttcaggagattcaaatatcagctgtcaagtaaatgtaaataagatagcagaaggtaaaatcagtctttctggtcaatactggtaactctagtgtaaattttaaaaacttaaatgctaaagaatgtataaatctaaacttagtgtcattatactatcttgaatttgcacaaagattattgtttatgtctttaataatctcaagttctgaagcaaatggatgccatttttttctatctattggtgtttgagtccataaaccacaggtaaagcaacagaggaataaaacactgggagcagggaaaatgggaggtaaaagagaagactaaataataaaaggcaccacttgatctaagtatgattaaatattcattaacgctgttcagctgtggattttggtagtgctcataatactagaattaacagcactaattttgatagggtgaaatctcatttaaatgtcattttctaaatgggcagagtataagttcttaaatatttaaacttaatatagacaaaggcctaaagtacttggctacatgcttttttcccatttgaaaactaaaaagtgtcagctaagagggcttttcctatcaattagcattctggttactgaatccatcatatagttaattgattgcccttgtaccttatcaatgcacccagatgctgtggtatgaacacatttcataaattaaagaagcatatggaagtgacacagacagtagcatttcatcccagaacatctttaatatgcgatgctacatcactaattattttgtaaatatgtaagtatttccctagttaatgtgttggtgagaagtttgcttggcagttgagcccaaatgttattgtaaccagacatttaataacagttcaggactcttgtagtttcattccattctgcccataaggagaatgtgtctcttagcctactgggcaaccttgattgtgcaaagtcaatgaaaatatttatcctttattactgggtaattttccttaatgaacagcagtctactctccataatataaatatctgtccaaagatcggtctggagactctttctaaaaatgttacagggaatttgccaagtgaggagcatattgctgcttagtgaatttttttccattaatttctaaggatagaatatgaaggaaattgcagcagaaataagttggctttattcttcaactttgggaaaactagtataatgatctgagtatattatcctgaatttaccttaaggtaccaaaagtaaaaatttttttcttcttgtctaagtcataatttcttgtcaagccaagtttcaaaagttaagtcaaaagaactttttttgagaatggaaactttctttggagaatggaaattctctacattaattaatgtattaatacaaaatccactagataactgacaagtgagctgcgggcaacccaaaagattgcatttaaacattttaaatttgtgtttctgttacattttagaagcatgatttttgtcagattaatttgcacttaggactgaaaactgtatctgggttcaactagaattttgtaagagtcattaaaatcagaggattcagaaataagttgattttcatcctccttcagtcctatgacttttctgggcaaaaactgtgtccagttctctgggagctgggggtgacagagggcttgatggaggctgctgagagattaatttcatttcagaatttgaactgggtattggtcaggctccacgctgcatgataaaatcaacaaatacttaaataaaatattcaaaagttattctgtaaatggccatctattaaaaagtcagaaggaaaataatagtagattagtttgcatggctctaaacattttcagaattgaaaacttatttagggaaaaatttggtaagccctatagatgcttgaatcatccaaagtctagtaaataagtttagtattaattgccacttttatatttcgatgctactaactaaaataatacaatagcctactgttaatttctcttctgcttttcctgagcttggcaaagagaaaaatgtgacaaacaccacaaatagacaacacaccatttgtaatctggtaaagcaacttctattcatggaatttcttccctttatgaagcgagggctatctaatttaatgaaaatagttgtcaccacagatatgacattctgtctcctaattaaatgaagatgcaatcagaacttcccttgaaaagagaggccaggcttccttcactattaagcacactcttccctaagggcaccctcctaccctttttctgatatgcaatcccttctgtcctccatctgctccacccccacctattgtctccactcactccaagcatgccaatcccatctggctatactcttgcttctgctagctctaattctccacaggcctagggaatgtttgaatgccaaggcatttttgcttttctcgagaataaggactagctaggagggtatcaaacaattccccaaggaattcacacacacatgaacatgcacatggtctctcacatacacaaacagcagtttagaatcctcctctaggatataatttctttaaaaatgtttttaattatttcatctgggaggcattttagaaaattaaaatcttactattgttgaaataatcaaaattaatatttcagaaataaacactttcattatcccagacacgcatttttttcagtaagcagaattaatgtaagtaaatgttactcatatcttatcatgaaatatttacattaatcaggtttaatcactgatcactaatacgttttctgttttagcaaacatgcatttaattcagacattccatctttacaaatgctcatgaaaatcccactctgccacaaaagcatgcatggtcagaatctaagcatatttaagcaaaaatttcagcaagtcattaacaataataaagcagtctggcaagtactgaaagcagcttttattcatgcttttacttgaactaagttaatacatatatacatacatatgcacacacacacacacacacacacagacacaagttttggttgtttttgccacaagcatgctgataaacccctgaagctcacacaaagcagcagacaaaactagaagcaaccatgctcagggtttaaggacattttaaaatttaaaacaacctttccacatttcacatacagcgtgcataaatttgacatgcaatcttcaagaagaaatattttaacataaatcttaaaattagtttatccaaatgagtttattcttattttcattattattgtttttaggcttctggtatcttaaaccctgcatgctgcagatctaagctgtgctcagcagcggctgtgacagaagaagctacctgcaagttttcacagtgccatctcatatccatgtctgtctggctaccctgcgtgcttagagcttttttcttaattcttaatggaaatcctaggaaatttagtccatcctctgaaatcaatactggtgacaggagagctccctgactcagtgggagatcaagatgataaattgcctgcgcatcagcccggcctatcagtgccctgcacacagatgggcgagaaaagacacagaaaacgctctgtcagtcacgtgtcactgaggagccaatggctgacgcactacggcaggaagggatgctgcagttccgtctgcagttgacgaggctgttggtacacagcccagcccggcaccactcaaaaagtctcagcagtcgttgcttttcaatttgctcccctaacgagaccgcataggtaaacagacctccctctaacccccgaccgaaaaaaaggcttattttcatgcacgaacattttctgtatattacattcaaatccagtgtgattgctaaacacagaggggaaacttttttttccccagcccttaaactgttatgtgtttttcttgagataattatctttttacctaatattaaattagaagacttaaaactgtgcaattagcatggaaccctcctagtagaatctcctcgaagccttgtaattgtaattacaattttatttgtaagttaatgaatgacattttttgaatgccaagtttataatgagtatttttatgggatgagtttgtaaagacaattatgcaacattaagaaatacattcttaggcttttttttttttggccaattacaactgttgctctttaaagacaatttaagtcccaataaatatgccattttatcaatcattaaaaataaaaacaagcaccaaaagatgcacatcctgtttcccaaagcctgaagaacaaatgtattattcaatgatgaaaatatgtacttatttgctgccttttctctgaaatttacaataattatttggtaagcaaagactacacatctggaataccatatggaactatatccccaaatacatctgtttccagtgatcatactgtaataacagatatgtttacacacttcttcaatgtgagatgattatatatagttatatatacatatacatacaattatatattatatatatgattatatacagtctgacagggtaggctataagtgatgagaccggtgtgtgtttcaaatgacagtatcacggagattttttttttaaagctcaaaagtagcataaaacaatcttcaggaataaaatttctagaagaaaaattaccctagccaccctggcacttttattgcttttcattgcccagttttcatactattcatacatttgaaagaattaattctaacatcttttagagtctggcaacactatttagaaaaaaagtgtattggaataaacattgataggtgtgcctcataagtaaagcttatgagttgtagaatgctgaaattccaaagctcaatttgtcttggcaactatttttttaaactaaacacattcctgaaagattgaaccctgtcaagtttttttgcaaattctttctttcattcaatattgactatcaggaaataataaagcatttttcaagttttttaaaatagatgttgtcatgtgtttttttctatttattcagactattcaataataacgtaattctcaacaaactttattcttaaaaaatattatgactcagagcacctgtcattaaaaacaaaataataataaaacatcaacactaaacctattcattagagcactgtaatagccccaaactagaaaccaccttaatcactgatagtaaactgagtagataaactatgatacagccttacaggtgaaatactcttcatctgtaaaatacaatgtggtaaatcatatgtccttatatgaagagatttctcagatacatttgaatgaaaaagccataaaatttaaattgtgtataggctatacttacttacataatacatgcatgtatacacacacaaatgattgcatatgcggaagaatttttttttttttttttttttttgagatggagtcttgctctgtcacccaggctggagtgcagtggtgggatctagactcactgcaacctctgcctctcaggttcaagtgattcttctgcctcagcctcctgagtagatgggattacaggagagtgccaccacgcccagctaatttttttttttttttgtatttttagtagagatggggttacaccatgttggcctggtgggtctcaaactcctgatctcgagtgatccgcccaccttggcctcccaaagtaccaggattatagaggcatgagccaccctgcccgacctacaggaaatttctgtaaggacataaactatcagttaatagtggccaaatagtggctacatctgaggagactgagttcaaaggtaggactgagacatagttttattaggtatcattttatacattttgtttaagtctatggtttacttttctaatttaaaatgaattaagataatgttatcgatgttcatgtaggtttagaagagcatgactggtatgttttgagggaaaatcttgagggaaaggaaggaagacagagggaaggacatgtggcctgctttttttcatgtaaagaaaatagtgtaggtgtgggcaagaagggaactgtaaaataaaggttctggcaatctctgctgaagaccttcacatctcatatcaacttgaagttcttttatctatgaatgcaaataataatacagacatggattaagagctttacaatttagagtgacgattaacccaaattttgtctgattcttccaggaacgaatgtaaaaggctgagaagtaaatgatttgtatatttacccagacatgggcaaattaacctcttcaagccttagttttctcagctggatgcaattagcaaaaagtggccaagctaaacttgaatttcaatttagggtattgttcactgctgcttcaaaggcaaaataacatccatgtttttaccaataatggtgtagggctaaagacaaaacaaattttcacgtgtttcctccccagaagcagcttatgttgtccaaaactgaaaacttggcttatagattctattgttggctcttgttgttattcagattcttgtaactttaagagatacaaacctaaaaaaaaaatgaattggccaaattaagtcaaagattacaatttgaataatttaagggttttggggttttacataaaagtgctgtaaatcagtggtttcggatggtgattttgctccatcccaccccccagggaacatttgacaatgtttggtgacatttctggttgtcaaaactggagggtgctagcagcatccagtggatagtggccaagaatgctgctaatcattctataatgtacaggacagtccctatcacaaataattatttggacccaaatgtcaacagtgctgagatagagaaaccatgttctaaatgctaaacttttctaccttctttccgaaagattaaataaatatattctgtattatgaagcatatattgtaacgtgacaagatttagatggagaagagaaggggaccaaggaccaagccctgggtttctccaattttaataagttacagaaaacaggaaaaaacagcaagtgaggatgaagagatgggaggacaactcaaaggatggtgacctggaagtcagtggtaaaagtgtgttagtaaagagattagggtcaatttgttcaaatgctgtgataggtcaagttatctgttcttcataggttttttaaaagaattaaagtgagaaattaacctaattgaaattaacagtatacttgaagtctttattgctctgcatgatatttgcatttttaaaggtatggacagaaaatgtagcggggcggtggctcacctgtaatcccagcactttgggatgctgagtcgagtggatcacgaggtcaggagattgacaccatcctggccaacatggtgaaaccctgtctctactaaaaacacaaaaattagctaggcgtggtggcaggtgcctgtaatcccagctacttgggaggcagagccaggagaatcgcttgaaccagggagtcagaggttgcagtgagctgagattgcaccaccgcactccagcctggtgacagagcgagactccatcccccacaaaaaagaaaatgtagtaattacagggatcacaggaggactagctgaggaaatatataaaggagaggaaacttctgtaactctcaaattataattctgaggctactttctctacaaaggtgggcttgtgagcaagaaagtgaacaaatcctatcttggaccaccctacaccacagcttgcatgggagacagagtgccaccctctccccttagaaactatgtctgcagttcttgtcctcgggctctcacgaagtgtctctatccatagataaggtttctgaaaacagagttctaaggactaacttcaggtgcttttcctcctgggactcctctaatgctaatccccacactgtcaggcctgtggtgttcagggttagtgcagcaaggctcaaagacagagccagctggaggactaggacactggagcagctttaagcaaagctaatgcctttgttgcaaaggaaatgttagaaatctcacagaaaaacagctgggggagggagggcagaggagagagagagagatagccataaaaagaaaagagaggccacaaaaaaaaaaaaaaaaagatgaccacaaacccatggatattattacaaactctatggtgtgggagaaaactacatgtcacaattctcttaaaactagatagatttttacaaattgaatagtccaactccttcgttttagagatggattttaatgtagagaggttaaataatttgttttaaattttaagtgaaagtgacattctttaccattcaaagcaatcagtgaacctgatattgacaaatttcaaggtgctttcaaaaatcatcatagataacaaccagggtaagacttaggggaaggaggtcgggtgcgggggctcatgcctgtaatcccagttctttgggaggccgaagcaggtggatcacaagatcaggagttcgagaccagcctggccaacatggtgaaaccctgtctctactaaaaattccaaaattagccaggcgtggtggcatgcacctgtaatctcagctacttgagaggctgaggcaggataatgccttgaacccaggaggtggaggttgcagtaagccaagatcatgccactgcactccagcctgggtgacagaacaagactcaaaaaaacaaagaaacaaaaacttagagggaggggaaaagttgatgttcagtaagagataaatctccaaagccttctctttcccatgctgatgctgtattaaggcacggagagcctttgctatcagggagaggaagtattatcttccaaaatattccaatgagtatttataggttatgaaatacaaaagaagaagccttgagtattctcctttcagaagaatttaagtggctgctgaagttttttttaaatgaaaattctcatctctatttgcactacagtcatgatgaataggatgcatggatgactttcaaaagacatatgtcagaaagtaaactccagttgacaggaactatagcatagggaaatattttggactgttttcagtttttaagagatgggaaaaatagaagtggtggaaaatccaagcagattgtcttagttttttattatttttcctttttctccttataattgaagcactactttgagactatggagtaccattaaattcctattaactattaatttaatatttgcaagtatggattagagataggatggaaattaatgtccaagtgagtaaaattccacatagtcttatattgtttttttggttttttttttctgctactgtattcttgtgggttttgtttttcttactctggttgtttatctaggtatatatgctttgtaaaaagcaaacagaaacaaaacatctgtggccccaggcaatcttttcattaacattatatcctaaaaattattatgctaatgttaaaaataaagaaattgggactcagagggattaaataacatatatatccatgaagctagcaactgaaagtctacgactacattttgaatgttctctccaaatcagaactagcgttccagaatagttgttgttaaagtttattatgcataagaaccaacaaggcacacgttaaacatccagatttctgggcccttccatggagactgattcctactctaactcagatggattccaagagtctgcattgttaacaaacattccatcttccatactttaagaaccttgggaccatattggagtttcagcttcggaattcttctttgggaaaagccatatcaacaagatttcaatgaatagaaatgggaagctttaaaaaaatagaaaggaaagttggtaggagtagttttttaccaagagagaaactggagcagagaatagcttcacagcagagaggaaaaatgcagatgacttagagccatccattaagggatagtttcccatattgagttagataaagtatgaagtattttagttgaaaatatttttgagcaaggaagattaatgtgcatagaagaaatgtacaaatcatagcatttagaataggatgacccttttgaacctacaaatagggcacttggctgaattggttcctacctccactgctgcaattagaaaccatgaatgtgcagatatacaggcaatgtcattttgtatatgctagaaaataatttattttcagaggggttttcatatgatgggtttctagacctctagagagaggtaaagtttcctttataagatgagaacctactgaagtcagatgaaaacctccccaattgcttgacaataaatcttcccagagaaaagtcctcagccatttcatgtgaaatgatgactcatgaaaatgaaatagtacactgtacagaaatcttgcaattctagtttttctcctagctgacttctaggttggaaagcttaaggtcaaagattagtggtgccaaaacatgctcattttaggctaatctctacatttcctactgccagtctctgaccagtttttaaattttctgagctttttggcatgctatgtatttctcttactttgacagaaggatgacatactattcactttgatccaacctcaagacccaaaggataaggttaataaggaactgaatctttcaggacaatgcagtttaccaaacagtagtcagtgactaaatatttttggtaactgattgatgaaagcactcatcaaaaaaccatagtccatggacaagtccatcagaagaaattaaggaaaattggaaaaaaggaagaatgaaggggagggagggaagagggaaaagaactaaaggaaaaatgaacataaaaccttacatgtagttgaggcacaacaatggactatacgagaaacttttggcttgtcagtgaatacagcttgtcaggcattatcaagtgtaaatcctcttcccccccacttttcccgctcttgataatgacccaagcaataatattttatgcaacaagaatgacttaaataagacacctatgaagaaggccacagatgacttcataaccctatgcatatgtacatacagaacccacatggagtgaatgttgcctattaacaaaactgtgaaatctgagttagaaacaaagctcagcttggactgaatatataaaaaaatcagtgaacagaagatattttcaaatggacacttacataaatacagcattccaagggaaaattccagcctcagatgcacttatttcatgaagactcaatattttatagcaatggttttccaaagttaagttgcttaagatctagggtgcttattaaaaatgcaaagtgtctggacccaccctgatctaaggaattataatttccagggatgagagtgaaaatctatatgtataacatgtactccaggtgatcctgacgtaggttgttttagactttatttgagacacacactctccaatgtacataaagtcaagaaccagattcttctccaaccatttcctgcagatagtcacaccagccttggacatgccgggtcatccaattcaattattaaacacaatgtctttcatttggagagatagaagattgataaatctagaaaaagattaggaatgatgagatgaatagattatcaatagatttcatgaaacaggttcgattcaatttgggccttgaatgatggtagagttaattattttggcaaaggcattgaggtataaaatgtttttctttaaaactgttagaatttattattaaaatgataaacttctttatcttttcagctggagggcttagcaatgcttccagcacatatgaaatcaccaataactcttagttgaattagtaaattacatgaccacaaaaaagtaaatctacttaaaaaaaacacacaaaatcccaccaccttgacaaaacttcatgatttttgttgatgatgctgttgttttgatttttatttcaaattcttcatttcttatttgtatagtttgaatagttatagtaataaagatataattttctttggttttataagttatataatggcacatacattttccatcttgatttagaatattcataattattctagtagcaaaagaataaataaaatggatgtattgtaatgtacatacctattctgtgttttttagataatggacgcatttctattctgcatttctgctttgtaaataacaattttcttcctttgtatttttttcataacataagtgaccataaatgagattactagactaaagacatagtgtttttatagatcttgaaacaatctgttaaactacttttcaaaagacttgttctaattttcacattgtctcaagcatgctatgttctataacatctttactggcatgaacatgctgtcttttctatctggggacgcccttttcccatttaaataaaaaatcttggtaaactcctacacattgttttgtactaagctcaaatgctattctttcttgcagcctttccaaatcctctaggaagagttagtcattatttccattgtgtttccatagtactttgtaataatactatttgggacacttattcaaatagctctgtgtttgttatagtttgtatatttcttttctttttcctagattattagcaactcaagggatgagccgctgtccacttcatctttggaacatcagcttctagcacaggggctggttatattagacattcaataaatgtttgttaagcaaatgaggaataaatgagtaaatgtcaatgtgatactcaagtcaaaatctgtggctgtatgttgggtaaaaatgctttctttccttaagtcttttataggtcatttagtactaggaacatttatatttttacgggtcttttaaattatatttttatacttttaatatttatatattttgtaggtctacatttttaatacctttgctgatgactttcaggcttagatagcacaattctatgatatgctgtgagtcagatctttgagtcctttagataatgacttttaggtattctggaatcagaaaatgtctttttctagttcatacagaaacaacttttgttaattaagtgttaggactagtaaataagattagaaaccacctgtggagaacacagcatgtacatggccccactgtagatggaataaatgttttaaaataactgctgataaattatttaacaaaatataatcaataattattctaacatatatcactgtgcattttgttgcattacatatattctctcattttctctctaccaaaactggtaagaaatacaaagactggacactgtggctccttcctgtactttgggaggctgaggcaggaggattacttgaggccaagagtttgagatcagcctgggcaatagagtgagatctcatttctactaaaattaaaaaaaaaattagctgggtgtggtaatacagcacctgtagtctcagctactcaggaagctgaagtgggaagatcacttgagcctaagaggctgaggctgcagtgagctgtgatcatggcactgcactccagtgcggtcaatagagtgagacctggtttcaaaaaattaagaaaaaaaaatcagaaaaagcaaatacagacaaagcaagtataccataaatgtaatttgaaagataagtaatctaacacacagaaatgtggctagcaagtggaaaaatcagaaccagaattcacatattttaagccacattttagccttcattctagtaaaatcactacacccaactgaattttgctaatttcaaactgagaaaatgagatctgacgtcgtataaactaaacaggtgttttaaaaacaaacagaaacttctctagcaataaaaactttttttccaaaataatgcttatgaataattcaatataaaaaacaatatcagaggactcatattgaagtgagtggccagtgaaggggggctcctttctctcctcttttatggctcttggtagttcctagagcttgcactcaggaaagcactgtattgggccatttctttacttagtcattcagtcattaatacatcttacagcctaactaggtacaaagaattgtgggaaagataaatacaagacaaagtcctttgagaacacacaaacacacacacacacacacacacacacacacgatagtatattataaatgccacagaagttatattgcatagtagtaagcattctgaaagttcagagaagaatgatgtctagtcccataccctggattgagttccacatgtccacctaaggacacacagattttgtttcttatttggtgacttggtacaaaccatttaatctgcctatttgggcatccattcctgagaaataaaagtgatcaatgttgccaatccaatgcatgtaatatgtgactatagggagagaataacttagtggagagaatggggcagtgaaatcagacagatctggttttacagctttggcacttagattgagctagttagttcaacttctctaagtcacagctgtttcacccataaaatgagagtaacagcaatatataccttttgaaaatttccataaggtatcaataagataaaatataacacctagcagagaaactagcatagattcaatggtcaataaatagcagaaatccttattaactattaagatgaagaagttacatctaggatttgcatagactattttgattctacgattcaataaattttatttttgacataactcattcaccgtggaagaaattagtgttctatatttaatgaagaccaaagactttggcttggtaaatactattcttagaattttcctccttttcaagctgtatagattcatgtgaagcctggaaaagacgctactatgttttattttgcaatgcactagattttgcttgtactctttagaaaatgttaggctttatttcagtcgtcatttgtgcataaactctagtcagatcaagcaaaaacaatgaagtcattagtgtgcactgagtttagtcacttctttaaatgctacattaattgctttgagattctctacttccactgtgacaagcaagacaaatggagtttacctgcaggacacatcaccagtcaccttcccagcaagctggctacaacctcatctgctccttttcacttaagaaggcatactgtcatgcaaatgagtgagaatgataacacagacaaaatcttgaatctacattgcttgatatttacaacaaaaaaaaaatattcactcactttggaagttaaaccattattagtaatactgacaacacatttcacattcgatggggccataccaatatgtaacaatttatggtacagaatcacttcatggtatgacccaaggaaatgtacttcatttgtggaataattaaaagtccatcctttctgtgaagaaaatgctttatactctgaagaccactatcatgaattaaaaaatccagtatcacaaattgtagacaacctaaaagaatgttaacttaataatatgtgacttcgatctaaatgaagtgataaattggccagaaactcagatgccacagggcacatatgttacataaataatcacataaataatctagcatttctctaaagcagcgattctcaattttggtcttagatcttattgtcactgttaaaaataattgaaaactccaaagacatacatattgtttatgtagattacatatgtggatatttactctattagaaattaaaggtgataaaagttaaatatttaactgatttaaaaataacaataaacccattaacataaatttaaaaaggaactacattttcaaaaacatacattttaaagaaaataatactgttttacatttttgcagatcttttcaatatcttttaaattagaagactggggctcatatttgcttctgcaatctattgcaatatttcatgtcatgtagtctttaaaaaattccactgtatccttatgaaacaatgagaatgaaaagggtaaagttttttctttttttgttgacatataataactacatatttatgagatacagagtgatattttgatacatgcatacaacatgtaataatcaaataagtgtaattagcatatccataatctcacacatttatcatgtctttgttttgggaacactcaaagtcctctcttctagctttttgaaaatatacattaggttgggcatggtcactcacacctataatttcagcactttgggaggccaaggcaggtggattgcttgagcccaggagtttgagaccagcctgggcaacatggcaaaaccccatctctacaaaaaatacaaaaaattagccaggtggggtggtgcacacctgcagttccagttacttgggaggctgaagtgggaggaccacctaagctgggcaggttgaggctgcagtgagccactgcgttccagcttggctgacagagtgagaaaaaaaaaagaaaatatacattaaattattattaaccatatttaccctgcagtactatagaacactaggacttattcctccttatctaactgtaattttgtatctgttagccaacttctccctattcttacttccccctttacctttcccagcctacaattctgctctctatttcaatgagctaaatttctcttagctcccacatatgagtgagaacatgcagtaaaattttagtattattttgaaaataattttgacctcactgaaaaggtcttacaacactcctttcccctgtcctaagccttggcctcccaagacttctagatcatattttgagaaacactgctctgtttttataatatttagagcatatattatttattattttttgtgtctaatttacatatatgtcctattgttgtttccctatttgaaattttcctgatggagatcatcattacaaaccttaggtatcactttacagcatgtggtaagcctgcctggaaccacagtgtacctcaacatgtaatattgattcaatgacccattgatagattgaagcctatagtgtcttatggtccctttaatgacctttaaaatatgtgatatagtagtatttttatagtttgtcaaattttgagcccattatgtcaacattctacctaaatagaaggatgagctaatcatacataaatttattctagatgaaacaacgtttttttttttttgactcagctgtgacttttggaaaagaaactagaattctagagaagttattattatacatttttttcctataaaatttatcctaacatatcaggcaatattttaaggtctaatcaatttatatatttagttgtaatttcacaattacaaaacaattgaaagcaaaaatatgaaaatcatcagtttgaattgatttgaagctatagtttcctatgtctatgagtggaacaaaaaaagtaacaaatattacttttatgtgttctactgccaaatcagatcctttgaaaggcacccacttagtaacttggaaatgaaacatttatacattcatccctgctaaattgctgcaaaatgtgatggttgggaaatatatattaaagagtgaaacagtcctcctaaattaaaggttttcttacataataaataatttctttgactctttgaaaatggttccattatctcctgatctaggaaacccacagagaaagacttagtgtctgccattaccttggtaatcagataattattctgactattctatcagaaaaaaaaaaaactgtacatactgaaaagaagactctttcctgctaaaatctgggtaaacaaaatagctgctagactgggaaacaaaaagaggggtcacagatctgagttgactcttcctttttcatgagtcataggacagcagatatactagttgtcttttgctttcagaagagttttacattacctaaactcatggctgaatcacaaagtacatggccagaagacttagtgacttagtaacagagttctcttagacattttaccctccttaaactaattttggtcttgacacagttaactattaaaaaaaaaaaaaaaaaaaagccctgaagcctgcctattcacctctgatcactgagaatgaattgaattatcaccgtacaaataaatttgggaagcaagataatgggagggaaaagagatgattaatatttgaactgtaaaggatatatgtctgaaatttaattattaacaaatgtgcattgatgcaattatgtaccattacatagcagagttaagaaatctaaattaagtaaattgcaaatgctataactaaacttataacaagttattttaaaaattaaaactctcatcagttgaaaactatatccaacagaaatcaggcaggaatttctaccacctgttcatatgcatgtacagtgggaatctgaagcattgcccagcacaatgtggcagccagactctagattattccatttgagttctgagtaactgtaattgtatgctattttaagcttatgaatgctaagattgtttaattcttaataagctgataggtagcccttaattgcatgatgaaaatccaagtccaatggcttgtgtgccacttgcctataaaaagcaaataaaggacttacatttctggttcaggttgtaatccaccaagtgaaaccttggggtctttaagctaaggatctttacttgaaaatcactgttttatagcttattaaatttccatgtcaaaaatatcaaagaagtcattcaacaaacatgtattgggtctactaagtggcaggtctctttaggactctgcagatgcagtagtagcaaatgtgataacaaggctctaagtgaattcatcttctatttgaagaaagtcagaaaaccaacagccaaccaacaaaccggtcaatgcactccagggaaagaccatgaggagcatacctttacttgaacaagtgagtttattaattgttgtagcaaggaagaacacacaccacacggagccatgaagtatcttagtaagatactaagtaagggcattagtaaaggcatattaaaaagaattcaggcttattcggtgattctggggagggtttaagaaaacaggactttgttctgtactggatgctgccagaaagtagaagcaattctaggattggatagctcaataaatcttatctatagcaagagcagactagagtgagaataaagttatgattggtaggaaagtagtattcaacttaaccaataagatggtttgacattttgtgggttatatagtgacaccaatttttatctgttttttaatgaaaaaatgacatagcattattttcactcactttattatggtcttagtgtgactgtgtttcatgttggtactctatgaagttatttctctctaatgggtgaacaatatcatctacctgtgggctccaggccagcttctaacaatgctgaggcctcacttacggattagatcagttcccagacaacaggggctacttttccctttcaatcatgcaaccagccaagcaataaatttaaaaaaaaaaaaactatcaaagagtgatagaacatagtaaaagggatggccctttatattgggtgttcagggaaaggctgttagatttgaacaatcagaaggagccaacatatgactacagggggaaaaacatttctgtcccagtgaataactactgccaaggccctaagataagaaagagtctgagcatcaaaagaaagacagtgtgatctaagaatgatctaagagcacagcgaggaaagacaaaaggaaggagggagagccaggtggccagatggaagttgtgtagggtaggtagggtattgtgactttattctatatatgataggaaatcattgaaggttgtaagagcagaataatgacataattttatttatatatttaaaagatcatcctgtatgttccatggagaagcagagatgtgagtcaggaggttttgcagtttaggcaagagataatagtggcttgccacaggtattggtggtggagaaggcagagctgactgttctgaagtcagtgttcataagacttactgataacatatcagtaagtaatttgggaagtgaaaagcaggaagaaatgagtgaaggatgatcttaatagttacttggttcttaatgtcagtgataatcttattcatcatgttattcctaatacctgattcacagagggcactagatatagaatgaaagaataccttttgtagctaatgttggcactattagcaagcttcaaaagtatctgcatttattaatctccagttggggtttggttcctaatttcttctgttgatttgcagttaactcagtggtggtagcaaggtacaaaataccccaggactacacagaacaacacaatcaaggtagaattgacacaaataactcctaagaaaatgtttcctacatatagagtaaataatttactaaacatgcttaaaataaataaatttggaaaaaaataaaataaatagaaaacttcctcaaattgataaagaacattcttaaaaacttattactaacatcatatgtaatagtgagaaacttgacacttctccactaagactagaaacaagacaaggatatctccctttcaccaactgtttcaacatcatatgggaattactagctactgcaataagacaagaaaaaaatagtaggaatacagattcagaaggaagaaataaaactatctttgcttgcaggtgacacaattgtgtatgcagaacatctgaaagaatcataaaaacctcctggaactagtaaatgattattgcaaggtcacaagatacaagtttaatatataaaagttaatctctttcatatataccaacaatgaacaagtaatattcaaaataaaaaaaacataataacatttacattagcacccccccaaaatgaaacacatagatgtaaatcaaacaaaatatctaaaaaataagtagttttcttctatataaggagaactacaaaaccttgaggaatgaaatctagtaagtaaataatggatagaactaaataaatggatattccatgttcattattattgtcaaaatgtcagttcttcccaacttgatttatagcttcaatgcaatcccaatcaaaatcctggcaagttattttgtggatgttgacaaactgattctaaagtttatatggagaggcaaaagaactggaatggctaacaaaatattgaaggagaagaacaaagttgaaggactgacatcatctaacgtcaagccttactataaagttataacattcaagacagtgtggtattaatgaaggaataggcaaatagattaatggaagagaagaacccagaaacagacctagataaatataatcaactgatctttgatatagagcaaaggttacataataaagcaaagatagtcttttcaacaaacggtgctagaacaactagacatccatatgaaaaataatttagagacagacaattgacaaacattaactcaaaatggatcaaacccttaagtgtaaaatgaaaaaccataaaactcttagaagacgacacaggagaaaaacctagatgaccttgggtatggcactgactttttagatacaaaaccaaaggatgatccatgagagaaataattaatgagctctacatcattaaaataaagaaaaaacttttggaccgggtgcagtggctcatgcctgtaatcccagcactttgggaggccaaggtgggtgaatcatgaggtcaggaaattgagaccatcctggacaacatggtgaaactccgtctctactaaaatacaaacaaaaaaaaaacaccccaaaaacaaacaaacaaacaaaaaaccaattagccaggcatggtggtgtatgcctatagtcccagctagtcgggaggctgaggcagggaaattgcttgaacttgggaggcggaggttgcagtgagcccttcctgcctagcaacagagtgagactctgtctcaaaaaacaaaaacaaacaaaacaacaacaatacttctgttatctgaaaaactctgttaagaaaatgagaagacaagccacagactagcaaaaaatacttgcaaaagacctatctgataaaagactgtgatccaaaatatacaaagaactcgtaaaactcaacaatgataaaacaaaaaaagggccaaaatcttaacagacacctgaccaaaaagagatatagatggcaattgagcacatgaaagatgctccacattatacaccatcagggaaatgaaaattaaaacaacagtaagatatcattacacgcctattagaatgaccaaaatctggaacactgacaacaccaaatgctggcaaggatgtcaagcaacaggaatgctcattcattgctagtagaaacgcacaatttcacagccattttggaagagagtttggcagtttctaacaaagctaaacatacttttaccatacaatccagcaatcactctgcttggtatttactcccaaaagttgaaaacttacgttcacacaaaaacctgcaaagagatgcttatagcggctttatttataattgccaaaacttggaaccaaccaaggtattcttcggtaagtaaacgggtaaataaatggtggtacacccagataatggaatattaatcattattttaaaaaatgagccactgaaccataaaaagacatgaaggaatcttaaatgcatattactaagtgaaagaagccaatataaaaaggcaataatatggtataattccaaccatatgacattctagaagaagcaaaactacagagacagtacaaagttcactggttgctaggggttttatggataggatgaataggcagaacatagaggatttttaggtctgtgaaaatactctgtatgacactataataatagatccatgccatgatatatttgtccaaatccacagaatgtacgacattcatgtaacctctggcctttggttgattatgatgtgtcaatgcaggctcaccaattgtaacaaatgcactactctagtggagggtgttgataatgagggaagctatccatgtatgggggcagggagcataaagaaaacctctaccttcctcttaattttgctgtgagcctaaaactgccctaaaaattgtcttttgagaaattaaaagacatttagaaatcatggaaaaaatagaaaaacgtaaggcaattgctcatcatagcagataaaaaatccaaaggttctgaattctgtcccaaaataccctcaatagggtgtccacctttacctcattaacttatttgaatggtacatttgtatctcttgaagaactcttagaagaactggctgtggtgatgttttctgccttctgtcaacctttcaaaatcacatgcccatcagatggcattctcaaatttcctgccctgtaccccaagagaactgtcctcaggaacaatacagaaactgcctaactaagtatagtcaataaaccactgcttcagaatcacaccggggatcctctgtttcccttcacaagcagagtctctcaggaagcagtaatgaagcatagtacgggggtgctcctccttaatgcctatgaagactcataattggaacccaaacttgctcttcaatgtgttgatgactctgcagacaaacctgggcttctctggtgtgctttcttattgtggaaaccaacaggtcaaaatattaatatgtgcaggcagaaataggtgtagaatataagcaagaggcctctttctttctctattggtatgtttgaagcaatatgactaatagacgaatccagtctgttttagaggtttagtttgggaaagtccttgtaaggcattaaaggagtagttttaattcacagataatacgacactcagatacaatgccagaatatccaaaataatttattgcattctacacccatggattcctgaaggttagagtatatttaaactacaccggtaagagttgttgggaaaaatacaagtatctcagagatcacatggtcacaacctacctataaggacctcaagccatgtaaaaacatcacagctgagggaactacttcaaggaaacaaagacagaacatggtcatcctaaaccccagaggcaaacttacagccattaaatagactcctttggccagtcatgctcattcattctcatttaaaataattatttgatgatacagtcaaacaagaaagtattctgctttttgtaaggcaaaaggtgagagtgaatttctagaagttaataaacaggttggtagttttcttccactttgctcataacatcatggaaaaatcactgaagtgtgagaaacaggattctgtcacaccagtgcctcacatccaatgctgcgagagaatgaaatattgacaatttaggtgtagttctcataatttcacccaactcaaaggaatgactgaaacactccttgataacaagaaaacacctgaggaagggagagaaaataatcattctctccaaccttctttgcacctttcgatttcatatagctaaggatacacatttctcacagtgattgaagagggtggcaacatctgtcaaatctgtagagtcaagacatgaaattcaattttaaattctcagtagaggagaaaaatgagagaaaggtaacttgtaatttcttccaattagatatacaggaataactaattgaaatgaatgttttataaaaaaccttcttttactttttaaaaactgaatttctacattttaataacattgtcatgtgtaattataggggtgttgaaattttgtttcctcttttctgagccctaagtttgccttctgagagaaaatcttgaaaatgtagtcatattttaaaaagtggtaaagcctactactgttcatatcattttcaaccatcagtagaccttaaagataggaaaagaggccgggcgcggtggctcacgcctctaatcccagcactttgggaggccgaggcgggcggatcacgaggtcaggagatcgacaccatcctggctaacatggtgaaaccccgcctctactaaaaatacaaaaaatgagccgggcgtggtggcgggtgtctgtagtcccagctactcgggaggctgaggcaggagaatggcgtaaacctgggaggcggagcttgcagtgagcggagatcccatcactgcaatccagcctgagcgacagagcgagactccgtctcaaaaaaaaaaaaaaaaaaaaaagataggaaaagaaagaaaatagcctgtacttcaagtatgaaagcaccatgctggatagtaaaaaaaaaaaaaaaaaaaaaagaaaaaaggatttagagagcctaagtgtatgccccttgggtctcatgactctgtcaaaatgacagggtgatttccagaaattcattaatcctttcaatgaatatttactgagcatccacagtgagcagtgatctgcacaggaagctaggagtgggatggggtgagtatgatgtacaatgataaatgagacacagaaaatgcctttgaggaccttatggtgtagaaggggagaacacatactttctcctaccttgtattaaaattatttgtgtgtgagagtcatgagaagtataaataaggtattatgaaagttcacagaggtaaaaaattaattcttacagggaggaattgcagaagtagaaataactgtctttgcctggaaggatgaaaaatctcaggacatgtagagaaggtagaagaacattttctttgaaagggatgggataagcaaggacattaaaaagatagcatggtgtacccacaaatcattcagtttacctgaatcaagaggaggacaggaatggaaaggaagattggggatttacatagtatggtaggctaaatccatctactttctaatctctggaatttttaaataagttaactgacatggcaaagtctttgtaggtataattaagactcttgagttggagatattatcctggattgtctggtgggcccagtgtaatgacaagggtcctttcaagtgaaagaataaggcaaaagaatcagagtcagagagagagctatactaatggaagcagggatcagagtgatgcaaggaaggggccataaactgaggaatgcaggtggcttctagaaaatgaaaaagacaaggtaacatattctcccctaaagcctccagaaggaatgcagctgccctgcccatccatgctagacttccaacccctagaactgtaagcaaatttatttgtgctgttttaagccactatatttttggtaaattgttacagcaacaggacacagatatagagtggaatgttttgaatatactacatcttagtccaaataattatttatccattctctcttggtgtacctcaacttttacttattatttcattacaacatttatgttgtattttttatttttataaaatatatttgcctgtctgcttcgtttgagttataaagaaggtgaaagtactactaacagaatacagaaaacccacaaagagaaaaatatttaaaagcaagatgctgaaatctttttcgaacacagtacgtttgaaataccaatgggtcaacacggtgggtggacagttggagatggaaattcatgcctcctgcttgaagataagagcgcatatctcttggaagcaattacaaaaatttattatagctcacaaaagagaatcattgaagtgtgactattgaccattgggaaaatttaaatagtatgtattcatgagaagggaattatttaatcagggtattttgacataggttgctggaagaagtgattttatattaagtattattagctaaaatattatcattttaactacctgtgattacctataggcaaggcataaggcaatctactggagatgaattcacgaatggagaaaaagaccttttaaagaaaagtatgtcatctacaagtttcttggtttttgaaatatctctagcaggacattaatccctcaacttctcaagtattttctgagtatctactagtgcaaggtaaggtcctttattcatttttatcctaacatagcctttggctttgagaagcttattgtctccttgccatgtaaagttgtgtacttcctcaaaatactagaaatttagaattttcctaaattatgattttccccaagggtatataagttttaagtctcaaaagcatacatggcctatcttacagcctgttcctagagttcatctctctaagatgagtctgaggtcactctctgcctgggaatctgaggaagctgggccgccggggtgcaagggagacttcacatagggaaaggaggcaaggaaggcttaaagtgagggcaataaaaataacctttacctgtttcaagtcttgggttggcccagactaccaccacttcagggatttttataaaatgctgctgcattgcttttgctaaaagagagccaggtcagcagagtgggatgacctttcccaacagaaatgccatgatgtttagccatcaagcagaaatttcagggacaataagatactgtagtctgcatgcttttatcccaaagtgaaaaccatagaggtcaaaaatatgagttaagggaggaaagaattaaaacttttacctgctctaaactctgaaaagatgatggtgtgttcatccctgaaccttgtctcaacacaatttcagagaactataaatgatgcctcctaacagactactatatgacccgtgactcctgaagtagtacaatgagaaggataaccttcaccacttgcaaatcttaatgcccatgtatatacacatgtacatatttttaattgtaaaatgtgtgtaatgaattcccttcaagatagggaggatataatttcccataatatgtacttggttgctttttatatttttttagaaacgtcaaacttttttcaaaactttttttggaaatacccagtatttttttgctacccaaaacacatgtgaattggagcatacttctttatgtaacaattaaaatgtaaaatgaaccaatttttgctgaaaaaccaatctgaaatgcagtattcacttccctgccttcttaatcaaaggatgatggacataatttaacctttttaaaaaaaataatgtcatggctttcattattatgaatgataattattctacgtcgctgcgatacacagagacccttagggattgctgtggtgtatggagcttcttgcctacacgaagtagtgtaggtgctttttgttttttcattttgagccagctgttcataaatttttctctgtcttttctcactggcatgctgtatgtgggttgccttttttactactgtcgttgtagtcagtcttcctgcttccatcaactcctagccaaacaaagcaagacattcccagtgtgccaaagctcaggcaaattaccttgtactagcattttaggccgatgcttctcgtactttagtgtactacaattaatctggggatcttcttaaaattcagattctgctttggtagctctggaatgggaactaaaaatttgtgtttctatcagcaaccaggtgatgcctttgctgctggtctttgcaacacaccttgaatagaaagatattagctatcatgactttttagaattgtgtctagattaaaagaaaatttgttttgagggagtgattggctactctcctataaataagatctaaaaatttagaatatgaattttaaatatgctatctccaaaatgactttccttatctttatatccctgacaccaccacataaacatatttcccttctctatactaatatagcatttaatttcttcctctcttatggaatttatatatttataacttattatttagatataagtcaagtactgaacatgaagaggaaccaagtcttacatatctgtattttttgaaactataccttgctcaaaaatggttgttgaataactgtagcaattgaaagctataaggttctttccgtataatttcatattctttgttgcatcaatttttcaaataagtaatcaggaaatgagacaatagtataataaatcagtataaatttcaaattaactgttaagaaagtaaaacatgttttcagagttcctgcctctttgtcgtatacttatttcttcaatttgcctcctcccaccacacctcatagaacacacaaatagatataaaagcacatacaatctaaacatatatcatcttcatattctttaatttctaaaaccttatttcaagaaagggcctggaattaacttacactaaaatgtaatgactaactgcagcataaagtatatttcctaccttcaccccaagaagggcttaaacgttttaatagaaatcaaagcctacatagtggaatgaagctgtggaagaagatttttcggtttttaatcataaaacaaaaggtatattaaatagaacctctcctaatactctcacattgggtgatgtttgcactgaacttcccctaactgagaattgctaatccacagctttcctgcacctgggctgtaaagttgctacatagtgataaactgcttgtatcctgatatgatgaactaatatgcacagaaaatcctcactaaaagtgcaagctatagaaacagtcaaggctaaagcagggcaaacacaaaagtcaatttggcagctcatttgaatctacattgtgcttctttccaatggcagacagaatttatcatctactggaaaagaataaaacaaagccccaatttccattaaacatttgtgtaataaaaagaaatggaaattatataactagagataattcaaatatgtaaataaaattgtcaatggaagcagacatcatcatagcttttgagttaatattatgtgatatccattttactaatttcatccagcacacaaatttgctacttatctcacacctctaattaaattagtggccacctacatgaaattcagaatgcactcaataacaggtgcttagaaggaaaaagtgaggcataaaataagatagtcaacataatttacacagatttatataaagttgctctgcatcaacatattcctaaacaatagagattaataagaatatgactctagataatagtcccagagtctagagtcatttctcttgttaacaggatatcaatgtggtgaaaagtgtacaaagggtatctggatctgcctttcctgactctgtagattgttcgctgtgaaaatggctaggatcagctgagaaatctgagcataaaactggtgagcaaggcaggctggaggtacagatgagttctggctgagatgcggtgcagacagctataaaatgaagttcttacagtatttgctttcttggtcatccaggggttgttcaattgtgaaagtcagacaacacggccttaatttcagataagataaaagtcataaaattgttattttcttcccacaacaaaacaaacccaacaagtcagcatattttgctcaaaaggaaagagagaataggtactagcttggcagtgccttacaaatctcagaccattgtagtcagtggctttagcatcaaagggacctgggtttgaagtcacagcccaagaaagcatggctgagctatttaacatctctaatttcagatttcagtgtccttatcacaaactgtggatggtaatctttatctcacagagaggttataggataaataaaataacatttatggattgcttagcaaaatgactgctcaataaatagtatttataactgcttacattgaagacaatcatactgaagtacaaattttatgatcccttccagtttatctgaaaattaaggagatgaagtgaatgcatactaaaattctttaatcaccaggggcttaaatattaaagtatgtaaagcatttagggggtatataaaagagtaagctattatcacagtgagccacagaatgtgttaagaagatagactctggggccaaattatcgcattcacatacctattctgctgctgcccagctgcgtgctttggatgagtaacttaaatgctctctgcctcagttttctcatatgtaaaatgagaataataacatttaatttttaaataaggtaaaaacgaaatgggttaataaacataaataagagattggcacataccaacttctacgtatttacatatatatgttttagagcacacacatactgttgtaaacagaccttagactgataagtaatttctgcctcctatatctacatcttattggaattttctccctttaagcgtggacatgacctgtgacaggcttctggccagtataaaatggcaaatgttaggctatgttataaagactccatcttaggagaaaggagtgccagactctcctgctggccttcaagaagcaagcttcttgatgcaagctgctaatggagagggtcctatggcaggcagcctctaagagttgagggcctcagttctccaaccagaaagaattaagttttatcaacaaccatgcaagcttgcaagagggccctgagctctagaaaggaatgcagccctgccaattctgtgattgtagtctagtgagagccaagcagaggacttagttaacctgtgccccgacttcagtcagaccacatgaactgtgagataacaaatgtgttgtctagagcttgtaagtttgttgtcattcattacacagcatagaaaactaatacacatacttccatatagaattcagagaaaagaaagggaggaaacgaaaaagcttattttctcagtgctctgtcttagtttcaggctgagcagccttgacctggccagtcattgctgagtctatcattgtaaagtacatttaggacagaaagatcttactctagtcaagatttctcctataggccctattttagcctctggccttcatgaatggcaagaatattaggatgtcagtgatagttgtttttccagcttcagattccagttaaggaattttagcaaaacaatatgaactagaaacctttttgagagtgggaatgagagatcaaaatatttgtcttttaacgtcaaagtttactaggttttgctgacaaaactaatcttatgtattactggctttctgatgagcttctgtcatccttccctcatttttctgccctgctctgtccgccattcccgagaaatagactaggagtcaagggatctgtgtacaagtttaagcttggcttgtagttagttgtatgactaaagatgataaagatgagccagctcaactctctcttctgttgacctgaaagtgttgggatgggggaaaatagatgaacaataaatgaaaataaagttcttgagaaaagttacaagggcagaacaaatacatgacagtaatgttacaaaacagtcttgaaacctcagaggaatctaggcaactcttaaaaagcctcaagccctttccaaagtatgaacctgcttatgatttagagtctgggccaaaagatttataggatttgagaaatgagaaataagtttttctctcttagacaactcctatataaaagcagtggttttcgagatagttatgttctaaggcttggtggatgagaataccctgattaattatgcatcaatatggaatagggtccatatataccacttctgtcattagtcccttctgtacctacaacaggtacagagatgagagatcagaggcttggggaagagaaatagcttgttaagattatagagctagttactttcagctgtgggacataattacaaaggaaatttgtacatttggttattcttgttaagtatctctatttgtaatgccaaacacaaatttttgctacttcaaaagctgttttatttcttaaatttgtgatgtctctattatattttgccaatgtgaggaaatgagtgtctaatcttgtcaatgtaatatttattctcaattcctgctatattcattcctcctaatttgaaagttgataaaatctgttggcaacctccttgaagctgcaaagcagttactcaaaacaattttcagaatgttcagtataaatgggcacatgaaccattcttgaaaaccgatgtgcctttttgcttcacatgtttaactaaagtcggttataaattttaaaattatttatttaactttttcacatccttgttttaaaatttccataccataatacagtgttctttcaggatcacatgtgaaatagataatatttccaacatttcatgaggagctatggggaagaaatgatgagcaattccataaggcactgatagacataaaataagagtacatactttcatgtcattccagatagaaatatcaaagatggaacattttccttccccttgacttaacagatgcccactctcatttagaactatttcctgacaatgaaatctagttggagagatacaacataataattcaaacacattgaaataagttttgcactgaggtaaaaaagccacagggtatgaaaaggcatggtgtagttggtgaaagggaggtgaggtattacttgagtaaaaagtttacattggtggggtggcagagataaaagaagatggagatagagataggcaggagttagatcatagtgaaagtcttgtagttattttagggaacccaggaagcttaaatctatcaatcaggatagtgacagggtcagatacatattgtagagacactcttgtgagtaaggaaagactcatttataataaaatatttgtggtagtccatatgatttggtcattctgcaatacatttatcaatatctcaaaactcacaagaacatgtaagcaaaagttaaggtatatatagagagagtggaagaatctttagtattctctggtgtcaatttgtatgtgatttttaaaaattgtttttggaagcattttattttctgtttagtggttgctgtagttttcttgagtcttctccctactgctaatttaggctatttggcatattcagcctcatggttgcaaaactggggttttaatattaaaacttccattgttcatttagatttttccttctgaaaatttgtagaattattcaaggcaatcttttatatacactttctaccttcctttgcctcccaaatcaacaacctgaaggtaggccgaattaatacacactagttgtggtaataatgtagttaagttgacactgtgagctgtggtctaggcagagaatgttacgtgcagagcttctattgtcttctttctcccaaacacagtggtaggttattcacattcattccttgctacacgcatctagttaaaataacttagactttttcaggaaagacaaactgaggccaaaagctattgctcatctcattgctaaaactctggcaacattttctgaattccacagatccacagtttgagaagatgattgtttaacttgtggcatcatgagggcccaacagtttagaaaacagtgggacagcctgttgccctgcagccaggtgataatccacagtaaccaaaataataacaaatattcatgaaaccactgtctttctttttcagctcattattgaatatttgcactgtatttattatttctgctgcaaagaaagtaagaaattaccaaccaatagatcatgttcttatcaagtgccaggcaaaaataattcttataactacacactaggaagagagtaggaaactggtaggaagggaccaaaatgttatacaacaaaatactatgcacgacaaagatatggtatactatagaaagcagattatttttaaagaagcgatatagacttttctgcaaatgttaaaaattgattcttattacttgagaggaagacaacttgctccaattctaaaatggctttaaatcattttctctttttaccagtcaactgctttcctacaggccaataatagcattaccaaccgggacaaccatgagagtctccttactcacagttgtccaaagcctttaggcttcatactgtggaatgtatcatctactttttaccagcattatcttccagaacctagagcaaataacttctcattactactaaaaacaaaacaaaagcacaaccaaaaacaaaaacacactcttccagagcttcccattacctagagaattagtctaacctcttttatagagtttttaatattctctaaacatctgctcaaaattattcacttccctgcattctaattaccttctgcaccaaattctacagttctcaaacacactgtgcatcttcacaatctttgctcatgctgaagcctctgcctcagacgcatttctgctaattctccatctgacgataacttactgcccttttaatgttagcatttttgccacagttagatctattaattttattggaatcaactttgccctatagagaggtttctgaaagtataacttgccaccggtgtccgtgctattaaaaacactcatgcagagaatgcatgttgacacaccttggttgtctacctcatcagtgactaccattgttcttatataacataaatcaatcctcagtaagtatttgtagacatggaacttcctcagcttgttccctttctctttggtatctcttctctccatcctcaaagctcataatcaatggccaattaattcctcttgtttcggcaatgttcctcttgcctacacaatattcccacttccattaccctagttctaattttcattacctccttcttgaactaccgcacttgcttccttagctattgctcagcttctagtctctcccttcttaggccattttgtagtcagctggtgaagtcattttcccaaagcacagctctaataattccattccctggcttaaaaaacatcaattgctctctaatgcctgcagaccaagtccaaactccttagcaggttttctatcatctgcccaccatttgcctttgcaaacttttgttatacattcccattatactcattctgcatgccagtcattccctgaggcattctgtggagtctctcccattccctgacctgatgtatgaattctctcctttgatctcttaggttactcttttcctcaacattgcctgttgatatacccacctttaaagaaacaaatgaaatgcctcttccacaatgatgtatgtcaagaatgtaattttagatttttttgctcctagagtatattcattgtattgctaaaaatgtattactccactttactactattgcatacaaaactgtgcttgtgattcaaatccccctctctgcagggataaatcatgttttgtttacttctcttcctggggttgggccttaaacagtgcaaacacaaagcacaacttctggatcatcagaacgatttagcaatgaaacaggctatctcgaagatgaaaaatatttgaagagaggctagatgctcatctatgaagatgactgaaggaaatgcatgcactaggcagatggtgagattgcatgaccttttaagtcccttacaagtgtaagtttctgtgctatcaagggaacaggccaggtacagtggctcacacctgcaatcctgataccttgggaggccaaggtgggagaatcacttgaggccaggagtttcagaccagcctggataacaaagcgagaccttgtctctacagaaaataaaataataattagccagacatagtagtgcatgcctgtagtaccatctcctaaggaggttgaggcaggaggatcatttgagcccacacatttgaagtcgcagtgagctttgatcccaccactgcactccagcctgagtgacagagcaagaccctatctctgacaaaatgtggtggtcacattttgacgtttgaggggtcaccacccctcgacaggccctggtatgtgatgttcccctccctgtgtccatatcttctcattgttcaaatcccacttatgagtgagaacacacagtatttggttttcggttcctgtgttagtttgctgagaatgatggtttccagcttcatccatgtccctgcaaagaacatgaactcatccttttttatggctgcatagtattccctagtgtatatgtgccacattttctttatccagtctatcattgatggacatttggctgggttccaagtctttgctattgtgaatagtgctacaataaacatacatgtgcatgtgtcttttatagtagaatgatttataatcctttgggtaaatgcccagtaatgggattgctgggtcaaatggtatttctggttctagatccttgaggaatcgccacactgtcttccacagtggttgaactaatttacactcccaccaacagtgtaaaagtgttcctatttctccacatcctctccagcatctgttgtttcctgactttttaatggtaagtgttattctaactcccaatgctgtctacctaatgtgaaagttcaccattctaagtaaccagtcctggctttgttatgaaatttggatgctgaatccaagagattaacaacatgatgacaaaatttacttattctctttaaatgtgtataaccatcaacaagagagacaagattatttatacatcaagatccttgccttattaatttcgtctccccaagtatctagacattcccaaaataggaggttcaatgttttaaatagcattgatacatggttttccaagtgacttgggagtatgatgacatctcctaagcaagagtgattggacccatgatgaattcagtttctaatgaacagaacactagagaactgggtttggatctaacttttggttcttttctatatcctcttggaggtagttagcttcctttactgtttagatgtggaaagggccttgtttgctaagtttggggaaatacaaaaagcttggcagtcaggaactaagcaggaatccaatggactgaaaactcctttggagaaggatgccattttttttttttttttgagatggagtcttgctctgtcacccaggctggagagtggcatgatctcggctcactgtgagctccgaggatggcatcttatggttctttttgattccttcctccctagaaaagtccagaatatgactctgaacactatgtaagatatgcacatagtaatgaaaattaattgacaaaattttctgtggaatctcaattgccttgcaagaaataatacaagtgcagatcgagtttttaaaaccctgcataggaaggagaagaaaatgaacattctgcttcaggattggagttttctttctgatctgctaattctacaaagtatataagattactcaacacgttttaagtggaaagcaacaagcttactctacattatagtagccataatgtcactagggggtgtatgtttggttgtgagagggtgttatcaatgttaattacaaagtttttaagagttgataaatttcttcataaaacaatgacataaaatatctcttcaaggtaacaaatcctgagagtcaaaaagctcaggatggtttcaatcaataactttataactaccaactatttgtttttccaaaattattaattaacaactaagaaattgctgaaagcctccttggagcatttttacaatctttgtatagaagtaaatagtatttatgatagtatcgatatatttggactagactttaccatggctatgggacctgctatagttcttgatgatcccttgtcatgaatggaacttaggtagctattgtcacaatctctgcagtcactaagcatagaaagtcctcactaaatgcactaagcatagaacgttctcactaaatgcacaagattcaaataagatggtattttccaattccttcactcagtcacttatatgagggctaaagccatggtaacatagaggctcaagtaacttaaaaaataacatatttgaaatttacttgctggaaagggacaccccaccttgattttaatgaatttcagagcaaatacaagctgtcctcagtggctttcatatgaattccctgcacagtcttcttcctttagaaatgcaaaaactatttcaagatttttatgcctgcatggagaaaattgctattgtgtacaattagcatatttactaaggtttgtcattacttttggtaattaaaatcgtacaaaaagagagacatatccaattcaagaaaattacacagtacagtaatatacaatcataatagtcgcctgacaattattaaaatacaccaagttctcccttacagtaaaagtattcaccagagtagcttctgaataagatcattgcagtgctttctatttaaatgtttttctgcacagaaaattataattacatttgcataactactgtaatcaatctagaattatggctgaaatttttattcttgaaatcactgttctttctaagatagtaggagctctgaggcataatctaggtttgtgggccattattctaatttgtaataggattaaatatatttttgcactctctttacaacaatcaatcactctagagacatagcagacgatacaactacatcacacaatttgttttcttctgtcttgaaaaaacaaaccaggctttaatttaccaaatccattttgtccaaaaagcaaaacaaaacgaactcaagttaaaaaaaaaaagtcaaatttataaaaggagaacaccaaatattatttcatgaaacagactcaataagaagtcaagcattcatctctacatttagatgctctgtacttactgagattagctgggatggccgagataatttctgtcccatcatggaaatactggctaccataaaccaaagatttcttttgaatgttctcctttactcctgctgtattcaacaggcttccttggagcctgatgttattgtcttatctttttaaaatatccaagtcagatctgatgaaaacgataagcagacctaaatacattaatctgcaaccagattctggtagagctagccttttgcaacgataactctaagaaaatgccctgctagccccttcttctgaccaatgagctgataatgtaagaccctcacagacaccatctgcatgcattctctctcaggagtgcagagactcagacactgtagcaggccagagaatgaggtgttctaaaatcccctctctctggtcctgctgcaacttgtttttggttacacagcccagctcctcaagagaatgacatctccagggatcaggccataacaaaagaaattctcaatagcacaaacaatatatatttcctgagaagcacaacataaagtcactacagaaagctaccctgaagcatttctctaacatgtggtttcaaaatcatttccatgttatcaatgctaattataaagtttttaagacttgaaaaatgtctacatgaaacattaatgacataaaatatctctgcaaggtagcaaatcattgagagtcaaaaagctcaagatggtctcaatcaataactttgcaactaccaactatttgtttttccaaaattattaattaacaactaagaatttgctgaaagcctccttggagagtttttacaatctttgtatagaagtaaatagcatttatgacagtatccagataagttcggactaggctttaccttggctatgagacctgatatagttcttgatgatcccttgtcatgaatggaacttaggtagctattgtcacaatctctgcagtcactaagcatagaaagtcctcattaaatgcaatgtctttttaacaaagatattaaactgaactcaatattttcatacttttttactttggaagatttggagctgtgctcaaaattgtacaaggaactgttttaatgaccaattaattcagattggcagatacacagaaataaacatgttcagagaataacagcaaagactacatagatacccatagattatgattgacttttggtgagaaactcagataagctgaggacaaacattaaatcagcagtggaattataaccttacttatctttgtgctcaagtgtttgtttataagcatagataatacctacctaagaaaaatggagcccagcaggcagctagatttatatttatataattttataaaataggttcttgcctcaccatcagaggctggtcaagttgccagcctctagaaaacattgagatctctaggtatagatatatccttatttggaaggtgtatgaagccaaaataaagacaattccaagattcctcttctttaaataaggtgaagacccttaaagatggagaaaaatagtcaaagaagaaggcaaagaatcatagaaaattggagataggtggatgttaagcacattttattttttattttcattttatatacataaaaattgaggctcaaacaaatgaatattcttagtcatgattacatagccagcaaatgcattgatgaatatacagctaaatcactttccattatacaacactgaatttgaagaaataagatcacattatggatgtaaggcaaacataatagcccagggtcaatatggcagagaaataaaagttagcatttttctatcttaaaagtattctggattttccccccatcttcataaggttggtaacaacaataatggttcatggacaacctagaatatttcatatttaaactagagtcttttctcatggaaaacaaaccatccatgtcttgatcaaaacaggggcatgaattactagaagaataagagcaaagaagaaataagcataaaatgtttttcaaggaccatcttgagataatactattataactgcatttacaacttgtatgtctttttaaatctgatatttgtagtagtgtatagattagcatacttatggaacaaatgtgtttctctttgtttaagacaagtaagttataattcatacaaaatattagtcatggtgtcatctcttcaccaattctattatcatgtataggtcacaagctatttctggttttcatttttctttaaaaaagaaagaagagcttgaatagatatagcattttgaaaattttgtcctgaaagacttttccacctccattcatcttacagatctgataatttttcaccaaggaaacagtctttgtcctggagtctcatatggctcttgccataacagtatatccaaagattcattcatttatttactcactgaataaatgaaactctacaaggcaccaagttctgtaccatggctatgtatactgttaaaaacaagaaaaagaagtagttgaccttttagaatttacactacagtgaatgggaaaagtccattttttttataatgtagttttcatttgagtattgttttgtattattaatagttaacccatggaatggaatggattgcactcctgaagtattacttctgtgggaccttcaatgcttgtggctgtgtccttctttgctgtggcacatgctttgctagtggaaagaatttgcaaagcccttttgtgggggagaaaccctacctgcttgggatctgatctgaaaacaaaacctacatttgttcatcaccactacctcctctctaaatcccttaaatatccctctactaacagtcactcaagatcatgatttaatcatttcatgtccaataaagtattgatttcattttcattggttatcttttatatgatcatttagccattttaggcattatatcttcaagaagaaggagatttgtaaatactacaaaggggttttcgttttgtgttgttgagatattactattaaagtttctttttttttttttggatacagctgtgtaaaataaccaagatctatttctcattctagcatgtggtctcagcattctgtacaaatgattttactggcttcgtaaactcccaagttaaagaatctctttaggaagaatcttaattgacctcttgaattgttggcctggtacccagagtaaaagaattgtgttttaataaggattacttttgtcgtggtttattatgctttagcaccacacgctaattgatgtagttgcaggaaataaggtaagacatgccatggtttggttaaaagcttcattacatgtatttatgaagagtcttatggatgaaataatttacaacatctattacatatattgaaatgtatgctactgcttccatttcttataatctgcggaacccaggtctgaaaccacttggtggaaaacgtttttaaattttattttggtaccaagtggcaataacaaaagttcaatgactggctgagtagcaatttggactgatttctaaatgtgggcacagcattaatgaaagacatttcttatttttgagataaagcaaacctacatgaaagagaaattacatcatttgggtactagtttcagtgaatgcctgacaatgggggagtcggaagagtggtgtaatgacggaatgctaaagctaggtgagttaggaagggttatttggagataagccttgagtaggacctcaaagaagggaagcaatgtggataagctagtaggaggctgatccagaagttaaatattaaaagtatagcactagagatagcaacaaccatgtgtctagactaaagagcttgttttttttttgtttttgtttttgtttttagaaatgagtatggatggagagaggggattatagcagagcgaatagtgttgaagtcttggtggggacattccgatttaataagtaagtatagtttctttatcaagagtaaccattcgaaaatgctatttgaggattagttaccaatgcaactaaacttcataatgaatgatgatcatggttagcacccactaagtgcttactatgtgttatatactattttaaaaacttcatgtatgtccttgtgtttaatccaggattttgtaaccatgatgcaattgacatttaggattaggcaattcttacttgtgggggactgacctgtgcactgtatgatggttagcagcatccttgacttctattcaccagatgccagtaatcacaccaaaacatccccacacaaccacaagttgtgacaatcgaaagtgtctccagacattgccaaatactcgagggcaaaatctccctagttgagaaccactgatttgttcttaacaccacgtttcagttaaatttcattaattctttttttattgcctctttttgtagttgaggacatggatgctaaataacttgcccaatgtcacatggttaataaacaaattttaaagcctccctgtgaactccagcgacttaattctagggcctggatttgtaaccactattgtctattacatccccataatctttctaggcaggaatctagcataaacaaaaaaagaaatagcccagtgtagtaagtctcgtttgaactgatatatgaaaaaaatggcagacatttaaattttaggtaatgctatcacagccggtgtagtcaagacttctgtcttttgttttgcaatttatcaaaaggctgactttctcatctaatcctatttcagtggtatgttctacataatttttaagagattttgttgtatctaaccttaaatcaatatcacagcagttttatgattttttagtgcctctctcatcatttcttctaggctttggctggacaaggggaataaaagccctgtgtttttccacaactataagaaatgcaattatcagagcatatcttgtactttccaagtatccctagattgtacaatatgcctaactgtcctaacacaaggggacacttgctgcacactttatgattagagctgttccatgttcctttaacgatatgtggaaagcaaggaaaagaatgctaggagggaaaaaggtctctcctttctttgatgtggaagttttgcaaatcatatagtgagacctcctaagagttcatctcactctaggcacacaggagactgtggctggagtagggaggaagaaatgagaataacatagaaatgattataaatggtcacagcctgtctttggctagaaaaataaacagggatttctgccaaaaaaaaaaaaaaaaaaaaaaaaaaaagacctgggcttgggaggaggcagcctggccctctgtgtgtggcctctgtttacccttctgtataatattatgacaggtccttttcaatgataatgttccatgcatcagtaataatgaatgaaaaacaagaaagcacttgcagggtttgcctattaccttaaaccactgaacatcatagagaaggcagcagatgtgacagacaaaaagagattcatagattaatatagctgaaagcacactgacagccaaaagcatgttttttttccattccagaaagttctacctgtgaaatctgagactctgccttttcatctataaaatgggataaaactatcttgcaggattttgtgaggcttagataaaaatctccaaggagatggaatttccaacagtatccatcaaaatacaggcactcagtaaacttacacgggctaaatagataaatagttttcaagtgaaaatgtaattgtgaagtgcagtttagttctctttgcctctctagggctttgtagaacatgaaaaaaagaagtaaggatctttttattttattttttattttaacaagacccatggactaaaggtaaagagtaatgcaatttaaaggaccaatgcaactaggtaggtaaagtcctacctagactcagaaagtccagacaccagttacaggaaacaagataaaatgtatgagtctcaggataagaccgagggtttcaacattactcacagaaggcaagatgccattttctacaaacttaggggcctttctttgcgtttagtcaactaaacttgaagtgagagaaggaactcaaataggagaaatggctaccatttctttgccggtgatgggggagaagtgaaagcagtggggctatgtattattctgttctcaccctgctataaggaactgtccgagactgggcaacttataaaggaaagaggtttaatttactcacagttccgcagggctacggaggcctcaggaaacttacaatcatcgtggaaagggaagcaaacacatccttcttaacatggccgcagaagagagaaattagtgcccgcaggggaaatgccagatgcttataaaaccatctgctcttgtgagaactcacttactatcacgagaacagcatggggaaaaccacccccatgattcaattacctccacctggtcccactcttgacatgtgctgattattacaattcaaggtgataatcagagcgcagacacacagccaaaccacatcaggctatatggaaaaaaataaatcaaagaagtttgtcctcagacacagaagcaacatttcacgttccaagacattctacaatgaagtgagaagcctggcacttccttcctccacttccagacttaataactggtagaacaataatatccgtaagtaacaaagagcctggaatggatgagtctgacaaagcccatccatcctgccacctcacaaactatctatatttgttcttttttctccagctttggagacagaggatgtgttccagctcacagactttcaggaataatactggaaattgacatctaatcagcattttatgcactataattgtgtaaacttttaggcctgctgtacaataatccttccctgctgtgtggtgagcactttggggccctctggatgctagatgtgatatgaatgggaagcattattattatttatgccttataatatgtcaactctatgtcctctgccacaacagacacttatttcaaatgtgcagtaacagcccccaagtgatgtattgtcaaaatatttttgaaatgaaaaagcaaaattaaccataaactgcccccttgtctccatgaaaatggcactgtaacactaccaaggaaaagcaatgttaaataataaaagctacaacaaaataaaagtcaaaaaaaattggaagagctctgtgtttggaagaagtatgctttggtaaatcacaacaatgacaatttcgctttccaattaaagtgtaatagtgaaagagcaaaccatcaccccagggtatcctcaagaacagctcaatgaattctggcttacttaaaaagaagttttcagtggagctgtttttcttgcaaaagattttagaaaaaaacacagcctttttttttttttttttggatttacattacgcgaaccctgatattatcagatatcatctaatgactcatcaattcatacagacctttaaggttggaaagcacatatttaaatatatagtagacagcaagtaacaaatgataggaactacattttagtgggtaaaatccttctgcaccatcaaagactttctaagagctatgggtttattactcaggtgattcagtttccattttgggacaggtcatattaattttcaggatcttttcccagaatgttatttaattagtgtgactaaatatctgaatcaggatgctacggtatttttaaaaaggaagatgtcgatttaaatgtgatagatacttaacagtttgataaacttttaacagactgtaaccttgatgctttccctggtgtagggaggcatccaagggaccctggtgaactgaaaaagttaatgcacttctctaaacattttgagtctggcagaatctggaactataaaataacatttcttcattaacatacaagtcacaatgctattcccataaagcacctctagcatataaggctggacgtttttcagaccatcatttatagggcgggtttatttttctttgtcttgacattaatgagctatgtattcagggaaatagaagatttcaatgcctgtcaaattacctttcaaattaccaaagcttgcttttctcctactcaaagagcaagcagggacttcttttagaatgggggaccaatggaatattcagtaaaaagggtcatgaaaataaatgtgaaggcagtaatggatccattccaaccatgacttcatgacaaaatgctgtgacttcagcatttcattacttgccatgttctcatcctttgtattattatcacacctcccctctctcccacgttattacatctttttgggaaaagaagatatgtgaaaatttctgtagttgtatgataccttgttctaaaatttagactgctgatttgatatgaaacacataatgtttttatagatcaaggctgccagttatttgtaaccattctgttacaaaaatctttcctgagcaatcttggtatatcatcttctgccacatccttagcaattaactgaagctaactgtttcactaacatttccttttccatttatgtagaatgggctgaatgtgttaatgcaatataacaagagaaataggcacagaaaaatcctctttcatatcgatctcagaatcctgtctgtgtctcatttgggatgaagagaaaaaataatcaagaaaatatgtgttggcagggttaagaatacaaaggaaatattactggaaaatatttaataggtaaatatagatgagggaataggcacaaggttaggtaacaagcagattgaatttcaaatttcctaatgactctccctgttttgcaaatccttccaaaacattacctcatctgtgctttcatcatccctagggtatagggttcgattactcatcctatccctttgcacaatggagaaatttacatgtattcagccctagccgtccttctagtcattctctcagtttagtacttacttgttttcttatttgggttttggcctgttctccataagtttgaaagctgtttgaggacagggatatgtttattctgtacttttctggtatcctcgcttggaaatttagtacttaagagctaggtcgggctgggcgcggtggctcacgcctgtaatcctagcactttgggaggccgaggtgggtggatcacaaggtcaggagttcaagaccagcctgcccaagatggtgaaaccccgtctctactaaaaatacaaaaattagccaggcatagtggcgggtgcctgtaatcccagccactcgggaggctgaggcagagaattgcttgaacccgggaggctgaggttgcagtgaaccgagatgctgccattgcactccagcctgtaagaaggagcaagattccgtctcaaaaaaaaaaaaaaaaaaaaggaggctgggcgcggtggctcaagcctgtaatcccagcactttgggaggcctaggcgggcggatcacgacgtcaggagatcgagaccattctggctaacacggtgaaaccccgtctctactaaaaaaatacaaaaaattagctgggcatggtggcgggcgcctatagtcccagctactccggaggctgaggcaggagaatggcgagaacccgggaggcggagcttgcagtgagccgagatcgcgccactgcactccggcctgggtgacaaagcaagactccgtctcaaaaaaaaaaaaaaaaaaaaaaaaaagagagagagagagacctagggagctacgtcctcattaactattataaggtggtttcagaggagcatgtagtgcactattgaagctcaggtttatcttaataggtgtatttgtatacattcattaagtatacgcagactaggcactcctcattttacactcaaaactcaagtagctgtaggactaaattacttatgattttgatttataaacagcagaagaacaatgggtaatccatattaaaaatgattgtgtatcatctcctaaagaaagcattttgaatacgtgtttatcctgttcttaaatggttttactctttgttatattcattctaattaaactgttctagtgcaaaaatgctaaagcaatttctgtagtttcattttttattctaaaattcttaactgtatactgaaagtgagcttatgaaacattcttgatatgaaaactcacaagttttcaaacataattctttatctttaaacacaatacctacctgaaattttgccagacaggcttatcctcagagtatgctttagtaggttaatactctgaagaattaaatgtaattcacatattaactactggtagaaatccatgtgcaatcatattgtttacttgataattccatatacatctttaaaatcaaaatgctctgtttcacttctcaggagcagttctgacacattttatactttttgcagattcaggattagccaggtagagctagcctgtgttggcttcccagttaaaaatcaataaattttaaacataaataaaaagaaattctctctttaaaaagtattttgaatttctatatgtgtgtgtatgtatgtataattacagtagtaaaaattttattaaatctctaccaaaatctctcctgacacattcctttctctttctacttttgagtaactataataatccttctcaatttttctagaaaaagaaacatgcattcaaactgatctcagaaaagaatttttctcatgccaagtcaaacaagttagcaatggtaaaatatatttcattaaaattttaatctagtcattaggtagggaaggttaaataacttaagccttttcttaactattaatagataatgtcaactcttgcctagcagcttcaataagcttttgcaaagtgttgaattccagtaagcactttcagaaggggtaagatgtatacgtgatcatctacttaggtcataatactgcacaaatagtgctaatgtgaaatatctgctgggatttttagtacaggttgtttttatagtttaaggatcaagttgcttagagagtgttcacttctctaagacatacggaaaatatctatgaaactttactatctgaatgtgtactacctgggcacactatatatagctagtatagcaggatggaaacttcttttggttggaaaatgcgtagacacaaatgacaaaatcaagtgtaagcaaagacagtaagcatattggaaattatcttggacaaagagaattttgcatttcttttgaatatctcctatggaatatatcacatagttactaaatgcttcccgttgagaaatagtgaagaagtatttttctaagaaataaattattagagactcaaatattaacccttattagccatacttacaagagacaaggatgttagttaaagccaggagaattctttagtgctgtctttctagacgttagaatttctcaaatgtattcagtaattaaaaacattttgaaaaatttttaaaaatgtaatatacaatcattttaacacatattttgctaaatcatctattcagaagtcctctagtttctttatgaccctatacagaagataattcaaaaccatggctacaacatatatgttaatggtaatatttatttatttatttagagatggagtctcgttctgtaacccacactggactgcagtggcacgatctcggctcactgcaacctccacttccagggttcaagagattctcctgtctcagactcccgagtagctgggactacaggtgtgtgccaccatgcctggctaattttggtatttttagtagagacgagatttcaccgtgttagccaggatgatctcaatctcctgacctcatgatctgcccacctcagcctcccaaagtgctgggactacaggtgtgtgccaccatgcctggctaatttttgtatttttagtagagacgagatttcaccgtgttagccaggatgatctcaatctcctgacctcatgatctgcccgcctcagcctcccaaagtgctgggattacaggcatgagccactgcgcccggctacaggcaattttttaaaacctgataaatatttattccttattgttccagtcctggatattaacttctagaatttaaaaaaggtgataccttagtactttctgatttaaaaattttattagctcttgtacttaatgattagatacatagaatgacagatcttctaatacaattaactctgtaaatcaagaatcttttcttccccaaaataatataaaaagatataaataatttacaaaagcaggggattacatttagcaccaattcaaagttcttgtgaaaacaattaaagaatgtgtgcaaaatttcaaaactgggatacaaatctgaaattttatagaatcattgtcaaacaattgcagatgcaagaatagtatgtttgatttatttcttcatactttggaacagaatcaagtttgtataaaaaaatcaaattctcaatttttacaaaaagagatgttttgtatttagttatactccataatttcctttcactctttctatgaaatctgtgatgagtagtcactgaaatatcaagacacaacaatgttagactttcattcagtggcctgtaaatttactggttgccagaatatcttatatagtaggtaaaaatagagcttctaggaagactgaattctatccttagttaatgctgaggttcaggctacatatattcccaattgttgctgaaattaagtagtactacatcattctgtcacctgccaagggagtatgtgtccttccttcctcactgatacccagggaagaaacaagaatgcactgaagatagtgatttgcagcaggtgctgaggctcccttgatatatgtacatatacatgtctgactccataatatactggaacccataagaaaggcataaattactaccaagtgtttctctcattcttcctggaaagaaagtcctactactttaccttgcttagtaaatctaggtgctgctctttcctaaatgaaattttgattaagaattattatatctgaaactcctttaacctccatcacttctctttttcaatgccatttgcaaatatgtgctgtaagatataaagaaacactgataagattacagttcccctggtactgtccaactaaaaaggaacccaagaacatttaagagcctggtgtcattttttttttctgggaaaatacatcccattttttctcctgtaaatgctttcaacctggtgacctatgacagctttgcagtgaaaatcttgaactggtttttacttactttgaataaaaggttaatacaaggcttcatggaggtttaatcagcaccacattcaaaaatgagggaagcaaaggcaaagctaatgaattgaccttttaaagagcaattcaatgggataattgccatagcacaattcacttcggggccgaatatgtgtatatggctggtcttccttggatccaatccaaggacatttaagtatgtaagtaccaaaatcatggtgggttggatgaggtggacaacaacatcacatacaacctagtggacctcaaatacatttttcataaaagtaaagctgtgctttcacgcataattttaacctaatcaaccagttcatgtatgccaccaagaaaaattaaaacattattaacattatctgccatctgtgctaaacactttatatttgttattttgtacaattttcatagcaccccaggcattaggtgtttttattcctattttacagatgaagttggatgtctgtctagatacattgccagttcttcctgaaatcaagtagttattcatccttctgttcttccaaggaattgtgtgtcctacctttctcactgatacctagggaagaaacaaggatacactgagaacagtgatttgtagtaggtgctgaggctggcttaatataggtacatatgcatatcagaggggtttaaataatatgcctgatagaccacggtggatgacattaggaactgagactgaactttatctaacaagaccttagaccgtgactactcacctactcttaacaaaaaggacaggtttttgccctgagtgtttttctaaaacatcttacatgtagaagtacccccaaggttaaactcaagataataaaaaggtttccccttggtcttatgccctacttttcctacctttatatttatgagaaacattacaatatatgtgctatcttataggagaaagctaacagtttcctttaaaggggggaagattgggcttttttctttaaatcaattatggctgtggctaaagaattaaagtttgagtgcagagaatcaggttttagtcccatttctgcaactagctttgtcaccagagtaattctttttttttttggagacgaagtctggctcttttgcccaggctggagtgcaatggtccgatctcggctcgctgcaacctttgcctccaggattcaagcgatgctcctgcctcagcctcctgagtagctgatattacaggtgcacaccaccactcttgactacttcttgaattttttttagtagagatggggtttcatcacgttggccaggttggtctcgaactcctgacctcatgatctgcccacctcagcctcccagaatgctgggattacaggcgtgagctactgtgcccagacaccagagtaattctttaggttactcacctataaagtgaaggttctgggctagctgatgaatgagattcacagtagttttcagatggtgtgatttcagtactgttcactcagcctatatatctacaaacactgcactagatactgtgaagagatacgcaatagctgacaagacacaggttaaattctgaatgggtttataatttggcaaattgggggtcggcagtgagtgaggtagagagtggaggtgcagcaacaaaaaatgttcttttatgaaagataatctttactaacccactacacctgcgatgttccttttaactgcatattcctacaatacatatatacaactctatccaaccacggctttacaatcagtcccaggagatgatttgtaaacaagatttggggaacagtagcaaatatgagtaggtagagaaatgaaattttaaagtaagaagactggcttatacggcgacaaggagttagagatgaggagtcagacatgttgaaatgaatggaacttatatttagataggcacataaatgacatgtgcaatgtcatatgaaacaaagctgctataggtcatggaagccacaatcttcaggaaagtagctaaagaaattgaggtggcagtgggaagagtaaatcaggaccagagcgtatgtaagaaaaatatgacaatgtcaagtagcagaaaatttgaaaatgctttggggtatctacattttaaaacacatttctggaagtaatattagtttcttaagcatctatagtgccaggaatgttgcatgcatcatctgtcataatttttacaatcatcttgcaaactcagatatactttcctattttatgcatgcttaagcaggttaagtggcttgataaaggtctctagctagtaaatgagaaagccaggaagagatcacaagtgtgccctgcagctagtaccacgtcaagtcttactccccaattaattttgcaaatatgaaaagtaatgactttagcctatgtggcccaacttcaggccagtcccaactgggaagattttataataacttcttagaaactgctactggctctttctcactggcttagtagtggatattaatctctttattttccatatacaggcatatggcttgcagacatggcatactgtgtgcataaaaaacttccttagaaaatacatcatccaagaagcaggaattgctgattatttcattactgcagcaaactcatgtttctaccatcccaagtccggactctgtctacaagagtagaaaaaatccactagatttttaattcaacatctattcaagttttgaggcacatgctatctgaaacaccgtaatttttgagtttgaaacagagaatttttctttagcaactttggccctgaaatgtcctccaatctcaatgtcaggaggtttgctacaatggtctggagagtgtagtttttcataaaaatatgttctatttttcaacaccaaatgaatatctctttcctgcatattgctcaaaatagccatttccttcacatggttatgttttattactcatgtcatcagatctggcaatgtgagatttatttagggggaacatttcatcaattacaaaacataaagcatgtgctgtctctcaatgagttcagttacatcttaaataagttctgagctgttgggagaattacaaagaacacacttttcctgaaaaccattaaaattgcatactcatagaattttaaaaaaattctatgcctgaagttttaatatttttatcccagggaagtggattttttcacttcctttttagattatggccctgagaatatatcacccgaaaatgaagcatgaaaaacaagacaacttgagagcaactcacagaaattagctgatttcatgatatttatgtgctactcacttgcattgtttaagtcttttcttttctttttttttttttttttttttttttttttttttttttttgagacggagtctcgttctgtcacccaggctggagtgccagtggcgtgatcttgattcactgaaacctccggctcccaggttcaagcgattcttctgcttcagcctcccaagtagctgagactacaggtgtgtgccaccacacccagctaatttttttgcatttttagtagagacggggtttcaccatgttagtcaggatggtctcgatctcctgacctcatgatccacccaactcgggttcccaaagtgttgggattacaggcgtgagccactgcacctggccctgtttacttttttcattgactctccctgccttaagagtaaagctcaagtttctaccctgtcctgatttatttccttctttccttccttccttccttcctccctcgctccctcccttccttccttctccttccttttctcttttccctttccttcctttgttcgttcccttccttccttcgttgcttccttccttccttcctccctcccttccttccttcctccctccctccctctctcccttcctccgttctttcctttgctccttctctccttttttgagacagtgtctcactttgtctccaaggctggagtgcagtggcactctcatgactcactggagacttgacctccgtggctcaagcaatcctcccaactcagctcctgagtagctgggactacaggtgcatgccaccatgtcctcctaatttttatattttttgtagagacagggtttcccagcttggccttgaactcctgggctcaagttatcctcccgccttggcctctcaaagagtgggaatatagatgggagccatggcaactgcctgagccctaccctgtttttgcagggccctgcatattgtagtctctgtctcctaaacaggggaaacttctatcctaacacctttgctcaaactgtgcttgccacctagaatatcttcccacatgcacagttatgggaagcctccttataccttaagggccttgctccagttgtaaataagccccgattcctattatgttgtgttagttttctctgggctaacattctgtcttcaagatctttgtgtttagatcctttgtatgtttcaatgtgtcttgggcataagtactgagagcacaggttaaatgcaaaggtgagagaggctgtggagaaaaaattaaaaaaaaaaaaacttttggcatatttagaagtcactttgcttctcttactgtcaatgctcttatttctgccctagccataactgtaagaaaatacttaccagttgttcaaagataggttgttcaaagtaaaacattaaaatgttgctctttaaaattctttttgtggatatactgagggagcttttataatcctataaatatagagaattgggtgcacatttcttctttaaagacaggtttttacccactcttcctaggtatctaacaaggagacatcaaggcattttaaaacaaaagacccagattctaaaataataatgtctttttttacactcaagattccaaacacaatttgactgaccttcaacagtcttgtaaatagccatatctagtctcactccctatagagagaaaatcaacagcatagtgtgtcctactgaatattatataagttgttagtatcagcattaaaacaagggagtcttactccttaggtgctgctacacatcatctggataggcaatctctcagcacaccacctaggccttatcttctgcacattgctcaggctaaggccatgcctggcaggtagtcagtatgcaacaaatgagccatcaaatataacaatataatgaaaggccattaggtagtctctagaaatatctgtccttaatcttacatttgttttttctcactgtatgtctaaacattgctagtttatcccagaaacctagttgcttcttttctgacagtggttgtattaggtaagatgggattgataaaataatcttggaatcttaacatgtaattaggtgaacaataaaactatataaccaaggaaatgtgctgggttcaagcataatcaagatacaaaatttgtcttcatggagcttgcaatgctgttagtgagtttgatggtctgaatgtttgtgttttccccaaattcatatgttgaaacctaatcctcaatctgatgttattaggaggtgaagtctttgagcagtgattaggtgttgaggatggaggcttcatgaatggaattagtgcctttataagaggctgaacaaaccagagttcttccttttcaccatgtgagagacaacacagctaaaagacagctatctgtgaagcaggaagcaggccctcaccagataccgaatcagctgccaccttgatcatggacttctagcctccagcattgtgagaaataaatgtatgttgtttagaagtcacccagtttataccattttgttatagcagccctattggactaacacagtgaagcagtcactacggactgaattaggtccctgcccaaatccatatatatcaaagccctaactcccagtgagtttgtatttgaagatagcatctttaggaggtagttaagattagatgaggtcttaagcatgggatcctaatccaacaggactggtggccttataagaagaggaagaggatgcacacacacatgctctccatcctacacgcaggaactaaggaaaggccatgtggacacacagcaagatagtggtttcctgcaagtcaagcaaagaggtctcgaaatgaaacctactttactggcatcttgatcttggacttcttagcctctggaaccgtaagaataaatttctgttctttaaatgcccagtctgtggtggcccaagcagactaagtcagcagtagggcacattgggctctgaatttaatatgaataggtttcaccacttgtcaactatttgactagagggactttcttagccttatccttaataagcccaaaggtcttttgaatgaaccttataagaatatctatctacctcaaaatattattgtgacatttaaaggagaaaaataaaatataaaatgccagctccatgccaaaatataaaataaaataaaatacccagctccatgccaaaaatgctcaaagatgcaaatgcaagcaggcatttaaaatgtctgggtaactatgtgtcaagtgggtagcagagacaaaaggactgtagaattttggaggagaaagagggtctctttggttggaagaatcaaagaacattcaagatagacttaatatttatctcagcttgactaaaggttagacaggttgcttcctgactataggcccatgaccttcttttccttagagcctttactttagaaaacttgcaattataaattctttctctgccccttttgaaatgtatctaaacctccttaaaagcctctggccagttctatgatctagggagtatctctctcaaggacctgcatgccatacttttcagatctaattatcaagaaagatagtgcccccatctcccagtctctgtggacacataggagtctatcataagtgaacaattagaaactataaaacactttatgtcatgcatatgtgagaaagtttactttctcctcctgtaaggataacaggcaaacacaggtggcctatgattctcctacatctgctcttaaaaactgtccaacactttgtttcttcagagttgagttcagtttctctcccctattgcaatagccttgattaaagtcttccttgcctgtgaaactttgtctagcacatttttctttactttgacaggaaacattcatagagaatatacaacttgaaatatgttgtaaggtatggcttagatattggtttggcaatgtataacttaaaatgaaaagctgcatgcattttcatgttagcagtaactagttatggcatgtctcaatgctttactcaagagttttcttgagatctttttaatatatattatttcaacagttactcagcacaaagtaagtattttttcaggctcaaaatcctgcactaacattgtaagctccctatggcactagagtttgtatatatactttcaggcagctgaagacataggtaaatctttgcaaatggggagagagggggacaaaaaagggttcctggctcataattttaaagcactacccacagtgggactgttttctaaagaactcttaagtatgcagcatatatactaacatgtaaagcacaccttttgcactaatcaaatgtgaagttatataaatttaatatccaatgacttaagaaagtgggatgccaacactcatctttatgactaaagtatacaattttatgaatcaatgtaaagaagccagcatgcttggaaggaatcttttgctcaaactcagattatgttattacactgctaatcttggtgtgtttttttaaaaacgtaacatccttctaatcaagcatgattagttacaaatagaatccaaagaaatatctcaaatgactatatatctaaattatcttgcttattacttatgggatatttttcttatccatatccaggttaattacaatttcagaaattatctgtacaaatgaataaaattcaattctcttagccaatgagttactttttccagtgtaaagtacagtcatttaggcattcacaatatatggaatttagaaatcttttaacatgatgaagttgaaaaaagtaaacaaatattactttgccaattctccaccagtcagaagcttgtctatatactaactgtgtatttagaaaatatcaatgcataaggaagagaaatgcaatttgtctcatccaaacgcatcatataaaatgaccaagtgctgttaagtgctagagatgtgtctcaaaagactctcaatgtctgtatcattttggggttgtttggaagttaaacccttttagtaagaagtattggaagataaatctagttctcagcccttaattcgccattcactggtgaggtgttcttattagagagcatgtctcctggtctcactagttcctaatgaatgtgtctggcctttcctagcaatatataaattctgagaaattggaagacatgattgctccctacccaattctgaaaagagtgaatatatcattctttgtaacagatggaatgtattaaaaatatatcaatatgtgttttcataaaaaagaaaatatctaccattcaattagaaaagtattttggagaataataaaaatgatagatatgctattttactgttactagccagccattattgttagaaagaatatgattctaaatatactgaaagtctggtgacatgtacaagacaggaaaagcacctttattcactcgtaataaatattttcctgttcattccctacataaactagaacaattaatattttcctcagctttcctggagaatgagatatttgacctgaaactttctctattgtgatactgctagcattaattaagtggcagtattcaagattaattggagacaagaagactagttgggaaattgttttgtcataaagtagaaaatagtgccatgatggaaggaatggaaaggaaattcaatttcagaaatttcacaaaggaaatatggttagatcattgaggttgaatttgcagaatttagtaatatacaccaagattgcaatttgagagctaaaagctgtttcaagttcagtgttctatggactaaactgtgttcccggaaaattcataggttgaaaccctaacccccaatgtgacttatttgaagagaggaactttaggaggtaaagttcaatggaattataaaggtggggccctaatccaataacactggtgtccttatgagaataaaaagagacaccagagctctttttccctgtacacagaggaaaggccactcagagagggtggctgtctgcaagccggtaagagagctgtcatccaaaattgaatggatggacactttaatattggactttccaggctcccaaactgtagcataataaatttctgttgtttaagctactcagtctgcagtgttttcttttatacacacacataatacacacatacacacacacacacgcccccatatttatatactgtgtatacacattatatatatattttgttatatatacatgtatgtatacacacatatatatataatcttattaaaatcttatatatgttatatttgtctctattaactaaaatttaagtaccatgagggcaggaattttaatctattgtgttcaccactgtttctacactgtctaaaacagtgcctttcccagtcctaagcaaaaagaacaaagctggaggcatcatgctacctgatttcaaagaatactacagggctacaataaccaaagcaccatggtactggtacaaaaacagacacatggaccaacagaacagaacagagagcccagaaataaggctgcacacctacaaccatctgatctttaacaaagctaacaaaaataagcaaagaggaaaggactccctattcaataaatggtgctgagataactgactagccatatgaagaagattggaactggaccccttcctcacaccatatacaaaaattaactcaggacagattaacaacttaaatgtaaaaccccaaactacaaaaaccctggaagacaacctatgcaataccattctcgacataggaacaggcaaagatttcatgataaagacaccaaaagcaattgcaacaaatgccaaatttgacaaacaggatctagttaaaccaaagagcttctgcacagcaaaagaaattatcaacagagtatacagacaacctacagaatgagagaaaatttttgcaaactacgcagctgacaaaggtctaatgtccaccatctataaggaatttaaacacatttacacacacacacacaaacccaattaaaaagtgggcaaaaggacatgaacagacaattttcaaaagcagacatacatgcagccaacaagcatattttaaaacgctcagcatcattgatcgttaaagaaatgtaaatcaaaaccacaatgagataccatctcacaccagccagaatggctattattaaaaagtggaaaaaaaaaaaaaaaacaaacagcaggtgctggtgaggttgcaaacagaagagaatgcttatacactgttggggggagtgtaaattagttcaaccattgtggaaaaaagtgtggcaattcctcaaagacctaaaaacataactaccattttacccagcaatcccattactgagtatatacccaaaggaatataaatcattctattacaaagacacatgcacacatatgttcattgcagcaccatcctcaatagcaaagacatggaatcaacctaagtgcccattattggtagactggataaagaaattgtggtatatgtacaccatggaatactatgcagccataaaaaagaatgagatcatgtcctctgcaggaacatggatggagctggaggccattatccttagcaaaccaacacaggaacagaaaaacaaatatcacatgttctcacttataagtgggggctaaataatgagaacaaatggacacatacagggaaacagctgacaccgggacctagtggagggtggaggttgggaagaggtagagtatcaggaaaaataactaatgggtattaggcttaatacctgggtgacaaaatagtctgtataaccaacccccatgacacaagtttacctatataacaaacctgcacatgtacccctgaacttaaaataaaagttaagggaaagaatagtgcctttttcatagtaggtgttttacaaatatatacttagtaaaggaatgaaataatgccaatatttgaatgtggttttgtatatgactcaaacccatatagatctgtaccctatttctatcatatttccattcctttctaaaaatgtattttctatgttgacttacctgaatactgttattctaaggtccacttggataatttatatatagtttcataaatgagtagattttagcagaggtgattggcccatattagaatgtaattcaaaacttgaatttattattttaaattgaatataacagcttggttctatgtgtcataagtagagttaaagtcatatacctttcttatatttcattcttccgtgtcatcacacaacaatgaagggtacataatgctaaaatgagcacattcattgactgcacatctcaggaagaaataaaagaatataacctgattatttgaagttacagaggctagatatggggacatctaataaaaagtttgaataatttcaaaacatatctttttatctttgtgagattttctctggtatttacattttcgtatcagcatttctcatgatctaggagttcctactacttgaattaaactatcatgttttctaattcttacaagctagatttttccttcccttacagagtctcatttctctacccacttactgaaaaggtagtattttctgtgtgtgtcttaaaatgtttttagattgcaaaacaaacaaaaaaactctcaaaaacatgctgttaacttctgccagctgtttaattaagcagattttataggaatgtgaacaataaaaagcaaaattctggagctatattgcaatccagataatattcttatcctcagaggaaaaaacaatgaccttcacttaagttctgctatattattggctatgatttgaataagaaagcttagtatgacaactgcaaaacatatacttggagaaaaatagcctaaaatataaaactaaggacaatgtaggagcatgtgtgttaatgcataacagacccacagacacagtgggtatcacaagcccttttaatcaagacagaaatatgcacatatatatcatgaacattaatgaaacttgtggaactcctccatggttccaaattatgtcctgtctcaaaatacatttatgtaccttatggtaaagtgatctttgaataatgggatcactgaccattacagttcaccgatgaatacttctaaggaggaaaggagagaaagctaactataagacttaaacagcacctgctgtcagctaaacaaattagctgccctgaaatcacatgtacccacaaggaatgaatagcacaacctttacctaggagactgccttcggaggaaaatgcgcagaatagaaatagccagtatgatatggcttggttgtgtccctacccaaaatctcatcttaaattataatcccggtaatcctcataatccccatgtgtcaaggaagagaccaggcggaggtaactgaatcatgggggaggtctcccccatcttgttctcatgatattgcgtgagttctcacaagatatgatggttttatgtgtgtggtagtttctcctgcattcattctccttcctgctgccttgtgaagaaggtgccttgcttcccctttgcctttcaccatgattgtaagtttcctgaggcctctccagctatgttgagttgtgggtcaattaaacctatttcctttataaattaccctgtctcaagcagtgctttatagcactatgaaaatggactactacaaggcttctaattgttatcccaaatttgttcagcttttgacaaatctgtatacacatttgtctttgatttttagctgtttgtttgactttttaactttttagctattaaattttatcatttactaggctagagcagaaatgataatacaggtttttcctcatttcttaaggtgtgattaattacaaacatggccaaaattcttgcaattcctctccttgaatttgggctgaccatgtgacttgcttaatcggtgtggcaaaagcaatgtaacgtgagttctgtacctgagcctcaagaggctttgcaaaattccattttcactcatgggattctgtgattaaaccggccttttggaggatggggcataagctgttctaactaattcatcttagatagccagtctctagctagcatggcaagctgatcaccaacatatgaactagtccagttgagatcagctaaacctagcccagatcagaaaaaccacctactgaagcccagtccaaatggcagaaccacagaattatgagctaaataaaaggctgccattttaagcaactaagttttagaggagcttggaacacatcaaaaactaaatgacacaaaaggttagctgagaaacattttttaaagacaaaatgtattttaatccagcttaaacagaatatctttattttggttaactttaaattaatagatgaaataggtaatgataactatacagggctaaaacattttatatatggttaggtttgagtgtaaaatttttatctcctttgttcttttttttaagtcagtttctgggcttctttttagcaaagcaaacagttatttggctctaattacaatcaaaatttataaaaaaaatttttgaagtcaaagtaaaaaatccagaatattggaatatggctaataaccaaaatcttcctctccttctaacactactttaatatctcactaatatttctattccttactccctggaataaattgaaataggataacaagataaaattatacctggtttttcattctgggttttcttcattgataaatagagggttatgaagtcagaaatataagactattttctcctgagatttcattaaagatacgatattaggaagactgaaggctattgtgctggcttaccacatcatatacttccaaccatcagaagtgaatgacaatgcaataatgcaaaagaactcagctcttatcaaccacagaagcatttagaatttctgtgactgctctttgagtacaaacgattattactaaactttgtcaaactgggaagattaaaagatttttcagggttgtgtaagtgcaataccataaatactcaaccaagtagaaactgcttcagcaggttaaactaatgtggggaagacactagaaatatcagaattcagaaacactgactccaatgcattgtttttttcatatttcagaatctgctaaaagttgaaaaccagattaattgcggccatagaaaagccttctcatctgtcatttgaatgtgaaaagaaattacttgaaatgtagtgggcattctacatttcaagaaagaaagagggtcgatgaatgaaataagcagaaaaaggaacagcttagaatatgatatgtagagatacctgaggataaagaaacagtgagagcgaatctgtagatagtctggaaggagattagcagaaaatatacataaaaaatcacatcagttgacatccctctactctgtgacattgtggtggcgtctaagaaggtcatcagtgtttctcagtatctggcattcctgcccctatgtaatgtccttcgcttgcatgtgggctagacttacagcagccaggaggaagtgtcacttccaagattaggttataaaaagcctgtggctcctatcctgggctttctctctctctctctcatctgtcctggaagaaaagtaaattgccagctgttgtgaggatccctgcacccacatgtaagataataaggcatgctaacaaccatgtaagtgagcttgaaagtgaatggcatcctacacacacagctgaaccttccagtgagactgcaggaatgatcaccagtttaactccagcctcacaagagatactgagccacaggcacccagctaagtttttctgggattcctgacccataaaaactgaaataacatgtttcttattcatagctgcctaatttggggataatttgttatacaggaacagatagctaaataaccacctaaaatatagaaaagaatagttttctccgtccttccctccctctcttcctccctccctccctccctcctttccttccttccttccttcccaccctccctccctccctccctcctccctttctttctttttgccaaaaaagcaaaaccaacaaacaaactaaaatctagacagtctttcttttaaaagcaaagaaaggctgggagcggtggatcatgcctgtaatcccagcacttttggaggcagaggtgggtgaatcacaaggtcaggaattggagaccagcctggccagtgtggtgaaacctcgtctctactaaaaatacaaaaattagccagtgtggtggcgggtgcctgtagtcccagccactcaggagcctgaggcaggagaattgcttgaacccaggaggcagaggtggcggtgagctgagattgccccactgtactccagcctgagcaacaaagcaagactccatctcaaacaaacaaacagacaaacaaaaacaaagaaacttcccagcactttgggaggctgaggagggtagatcacctgaggtcaggagttcaagaccagcctggtcaacatggtgaaatcctgtctctactaaaaatacaaaaatcagctgggcatggtggtgcacgcctatggtcccagctactcaggaggctgaagcaggataatcgcttgaacctgggaggcagaggttgcagtgagccgagatcatgccactgcactgcagcttggacaacagagtgagacttggtctcataagtaactaaataaataagcaaagaaactgtgcaaagagaggtaaggctctttctgtggatgttctctatttgggcattagtttgtctgctatatgcctgctacttccaaagaaaagcctgtagctctccatactctgtttattctcaacctgacaagcagtccagactggtgctaaagaacagaagatacacatcgagatccctttggaggtaggttgttgagggaaagagataaggtttgatagaattaaaactgtgactgggaatttaaaatgatgatataataaaggcaagagattcaatacaagaaaaaataagtatgttgagtagctcatggaaaaacaaaactatagaaaacaaatatgattcaaatataacgcaaaataaaatgtcctgatttctgagcaactgataagtgcaagggaatccacttgaccttgatcctagaggtggaaaaattctcctttgagtagtccaggtaatatgatatttaactcataaaaaaagaaaggtaatcttaacatataactgagattagtattggataatatttacacagtaatggtaatctaaatggtcttcattgttttccactttagaatcctcataatccaaataaaatatgggagatttagttgtggttggttgtcagacagaatgttaaagttaacatccctggaaataaaatgagatcatgagatgaggaaaagaagagggaagctagaggaatggggaggagcataaaaaatatctttagcttactaatgtggatacttaagagataagagatattcttgtaaattaatggaacaagaaattagatgcaactatattacttaaagcaacaaaatttatatataatttacatatagttttatctaatatatatcaagtattatatatataatattttatacacatacagacataattcacaggagagaaaaaagcaaaagaaaggattaaagcctgagctaatcctcaattttcatatccaggattgtataagtattgtataaaaggaataaataaacaaatggaacataagcatattatttggagatatggagctaattaccaaaaagaattattaaaagacatttactctggggaataagactgggagtgatgaggggataaatgtggtatcgttgcttttttatataccatcttctaaactatattgatttgtttttatgtgcttgctttatattaatgaaaacaatgtatcaattattcccacttacatatgtacaacaaagcaaaaaagtgaattctgggagtaatctgttactagtttcaggaatagttttaaaaaggaaggtataactggtatttgcaatttgagttatcatccatttaaatatattgtattttctttttttttctatttccttttgctttttttaaattacactttaagttttagggtacatgtgcacaatgtgcaggtttgttacatatgtaaacatgtgccatgttggtgtgctgcacccattaactcgtcatttacattaggtatatctcctaatgctatccctcctccctcctgtattgataggacgtatctcaaaataataacagctatctatgacaaacccacagccaatattaatatattttattttcaaataagccacatagcaagaataaattcctttgacatttcctaggctttatcaagatctgtctgttgtgaggaattcattccactacccaaacttcatttaagtctttgcatccaattagtgttatcccaacatgtccctctaatctcttcttttgcttctctagttctttgtacttcattcccatttttatttgcctataaaaaaatcatagtttttacatgcttaaactctgcaatgagtgtcttttaaaaatgttatacattttccctatttcgatctggttttctagatgtctaaatatcaaccttatgcacagcttgtcttgtagccctgtcaagagtcactggtgcaaactggttctgtaatcattaggcttcctagagattttcgcctgtttcttccactccccctaactggctgaagacatcaaaaaatcagacaaactgaaaatgtgaattctcgactctttgaaatgggcaagctacttgcaaaattgtgaagtaagttttagctatttgtctgtggctcaccacagacagcaaggaaaaggtaaactcctatgaagacaataagagatgatttcctgtagagaatttaaaaacaataacaaaggtgactgaaagtcagactgctttttattattagagtgtgtcaacaagtctaaacaatgtcagtgataaaatattcctcttgagaggggaccattaacaatgcccctcctccaccttggtacggcactataacccaaaatgatgagactctagtaaacctctggaacagggttttacacatgttaatctgtaacctggtaggcaaaattatgccactttgggcccgtctcttttccttttagggacaactactggtgcctccttcctagtcttatgagaagaatgtcagtagcataaattgaaatgggaattttgcttcctgcatatcgcatccacccctttttcttaaataaatatgcacatgctttttaaaaaaccaaacaactgtaatttcaaaatgtctttatactgcataagaaggaagttaattcttttaacatcttgttatatataccatctttattctctgcaaatattgattaatctaggaaaattcaggactgatacggtttggctgtgtccccacccaaatctcatcttgaattgtagttcccataatccccatgtgccacgggagggacccagtgggaggtaactgaatcagggaggtggtttcccccatgctattctcatgatggtaagttctcatgagataaggggcttcccccttctctcattattctcctttctgccaccatgtgaagaagcatgtgtttgcttcctcttctgccatgattgtaagtttcctgaggcctccccagccctgcagaactgtgagccaattaaacctctttccttataaattatccagtcttgggcctgtccttatagcagcgtgggaatggactaatacaaggactgagcaatacacaacatttatcttagcatcattttatgcattctgtgttcattatttattcaaaaaccacttactaagtgtcctttttgtatcaaacactgcattaggtgctgagcatacacacattaagacaaaggtcttgactttaagatgcttgtcaaaaaaaaaacttaaggttataatctctaacaggtagatcattatctatctatctatttaaatgaatctctattcatctatcttttccaaagtgctatgaaaacaggaaacaggttctgcttggggttgttcaggaaatcataaagtgaaatgcaaagtctaaaatcttcctgtgccattaacactaacaaagctttagtatttttcaaatggagaagtgtatcattaactagatcacaggtacagtcgcaaaacaagaaaaggaggaaataggaacactgctggcagatgagtcagtatatcagaaagtgggaagttgcattttgagtttaggcaatgtgaacagtttactaatagcataccaaatacaaatttcagactagattctttatacatgtgtttttttacttttctgaatcaaattcccaaacaatgtagaatgcaaagttatataagataattgacaaagttacataagataattgagccattaaataaaaatggaaaactccagtcacaaaaatgtctgaaactacagtgaaaattctctctttggacagtggaaagccctcagttcagaacagaacaagttgggcacttaactttcctgcagtgtcttatcttctatcttgtattagattgccatgtagaccctgtcaagaaacattaccaactgctagttaatgctgtgcacggaaaagtcagacttggtaatgtcaccacagaatttgaaaggatattaatgggtccttttcatttctgaaaaaatagagattagaaccagagaacttcccttcaaggacaatttcttttggaagaaacttatattccctttggatccatgaacacaagtacctacatcattttctagctgtggactcactctttcaaaacatactcagggacagctgatgcaaaggtaagcttggaggtgtagaaaatataaaaatcagtttttctcaagtgtgttccagggccaaatttttactgctgaattttaaatgctggtctatgtttaaggaagatcttataacagctagcatagcatggcacaacacatagagactcctcacttggttcattctccaatattttggggaatctatagttgaatatatttgttacttggtcctggagtaatgtgggccaaatggagaatcatttctcttatttgagatttgggtcatcatgtgtgaatctgtagtgtctagaataaggcctagcatatggaaggaagaatgaaaaaaaagggagaaagaagagaagaaaaaaggcaatagcacagtggggatgaggatactaaggaagaacaaatgagcacctgctatgtgccagatgctatgccatgagctttatttgtgcaagtttatttgatactctcaaagaatgtggcaaaacaaacatgattttaaagttctcattgttattgcttcatactttactccatgtcgcagttaaacattgaggttcacaattataacagtcttggagttttctcaatagcatataatttattccatgtaaagatgaagataaaaaaatgtagcttcccccatatgcctctagggtactctgtatgtcctgctgaagtagaaaagtcctagaagggagctaagggggccgaggctaccaactactctattaaatctacagacttgatggtaatgtctattttagaagaagctttccgcaaatgcaacttagattttaaagacatcagcaagagaatgtggataattccagagtgagggtagtgtctagcacattgccaacacttaagacgtgaaacacttaagaagcatgtttccccaatatgcttgttattaaaaagagtctaaaatatcttttctcctttaaatttgtctctgagattcaactgtgttagtgatgctgttaataatatactctaaatctgtcatgtacaaaagctttgctattgttgatgtagggcactttataatttatgtatagattcactagtaatctaaggtgtgagaaatggttcttcaaaaaaatcctgaattgctaggtatttatcctcaagaatagcataataatacctagcaaagtgtgctacatatattagttgcacataagattttgcaaatttgtaattctaaatgaaaattttgtggatttacaggcaacatatagcatggtaaaaaaaatacacacgtacatacactgcctattttgttttgttttgttaattaccatttggaatgcttactggataaaccattggttaacacaagtgctatttgtctgcttgagatttcatataaagagaatagtgataacaagaatacagtgaaagctgtttggtaaatgctgaataaaggcagagaaattacctgagccttctcctgaggtcccagcctaatggtgttaatgtattttttattgctggagaacttttcagtgataccaacaacaacaacaacaacaacaacaacaaaactaacataggctctagatgataaaacatgtaagaaattaacatagagatttaaaactaatattgacttagttttttgaacaagcttaatgtttacatatatcatgaaggagaatagcaagtatggttaacacacacatacacttgtatacacaaaattatcttttttgttttgagacagagtgtcactctgttgcccaagctggagtgcagtggcatgatcttggctcactgcaacctccgcctccgcccaggttaagcaatccttctgcctcagcctcccaagtagctgggactacaggcgcgtgccaccatgcccggctaatttttgtacttttccttcctccttcccctcacagacaatgattattatatgtaagagatgaataaatcaacaggtgtaacacaaacataggtatgtattgaaaatcagaagttcacaaagtattacagaacaatttgtagagctgataaaaactaagacaattaaactaggttatattcttgctacttagacaagaactaattatttaataaaaagatattactttgtcctaccactgagactagacattttagaggaagtgccaacttcaccagtcctgagaaaattcccactgaaatcactgtcatgtatcgactaggtacacagacttcattcaatatctccaatgctgatacagaatatatcaaaagagatatcgagaatcatgagcccaatctagtctaactcacagctggaagtacttgaagtttttcattctcaagttgaaaaattagtatataatgaattcttaagctccttaatcaaaatatgttatccaggatagatacagaaatcatatttgcaagattcagtatcacaccatgaattaccttctgtgtgtgacaactggggaacagacacaagaaacttcctgagtgctcagtcaacaataatttgaagttggtgaggaagtaggggaggttgcataaaacagcgcaagttatgggaatccttggacagctcttcgttgtccaggactgtcccagcattgcagtgtgtgtagtcctcatggacctcacgataactctctctttgtgttattacctgccctccactgccgcttgcttcccatacatacatcccttaggggaatggtgctgcctcattcaacagagaattcagcttggtacatgccacacaattgatgtgctgctgaagaaacataaattcacagctactcttcaagggcagagaaaatagctttaaaggtaagaaagatgctttaatttacagtgtgtacctgaagaatgcttctcagacatgactttcagatgtatggtgctcacctgtgacaggtactttgaacatttctttatattttaagatgaacatatgaaatttctattttttatagttaaaaactggtgaagtggccatcatttcatatggttcctatactcttgactcctataatcctcacaataaacttatgaggtaggaaactgaggtctaagtaactcacagctagtacgtggtaaacacaatgctgggatataggtgggcattttggcttctggagtcaacgcccttgaccactatgcatagtgccccaacatcccacacaagctttcagaccttagactcccagaacgcagggcctcatcatctgatcatgttaggtgtccagcatggaaccatatttataggcaatgcctaaatagatactattagaaggagtaatacatgatacaaaactcaacttcactcatgactcaaacacttactgtgtgaccttcgacaaatggttcccatttctgagggctaaacttttcagtctatcacatagaatgtatatggatgcattaaggaagggaacaatatgactgtatttgcattttcaaaaggatagtctgacagttgggtggagatcacaatggaggtggttaagactatgagaaagcaggaggtgatgagattctgaataaaggcaatacgtaagagcagaatatagatcacctcaatgtatcctgaaaaaaagtgggcagcatagccttgggtaagttagcttttctatgcctcaatttcctcctttttgaggaggaataataatatcaagttgtactttttgagtttccatctcttcctcagacatatatatatatgtctgaggaacacacatatatatatgttctgcaggatatgattacacttctgatttaattagcaaaatatttattagaagccagaggaccacagaggccaggtccttctagaggttaggagcaggtaaagtatatcttggtgttgcttttgatcttttctctggcttccagtttcctaagaaagctaatgctgccagtggcactatccatacagggtgcagtccttctgggtctgaagaaatgcctgaagattaatataccaaagttttatgaaattgatacctacatctcgaatactttacgcacatccattcaaaagagatttccatttcatggttcccttccacacacaggcatccccctcttccttcctctgtttttttttcttttttcctgcagcctttgacatcccacactattcgttttcttgtctattgcccatcttctccaactagaacataagttcggtgcagaaaagtctaattttgatcaatgctgtatttctacagactagaaaggtagtagaaaggtacctgagatatagcaagtgctcatcaaacttggttaagtgaatgaatgaatgggtatatgaatatatttatctcggactagctttgtgagaagacatctcaaaaccaagcttgcatctaccaatagagcattttgtcatctagtaaaacctccagaccccaaagaaaatgcaccacgcagaacttaaaaaaaatcctttaaaatgcattactctagtactttttcttgccagtaatgagaggagaaaaacaaagtctgaataactgttgcttacacgcatttaaaattacaatacattacactcttctcaccaggcaccattaagttcaggagaacatgcctttgtatatattttaaaatacacatcaaagtgtttttctttgaaatatgcactaaaatttgctgtaaaaatgtacattaatttaagtgaattcagaagattgattggactagggaaaataaattaattattcatgtcaccagtattttttaaatgcacagtggttatcaggaacatatataattataagtaatgctattattttttaatagcaaagttacagctaaggttaattaatatttttaataaaaataaaattttgttctttgaagttgcaaaatgtattttgttagctctaaatatttttcaaggaaatgtgtgtgaattctgcttacatttttcaaacaaataatattcatttttcatgagtacctccaaagcctccaagcaagcaacagaagtgtccaatatattcaaacattcttttcttgcataaacattaattgggttctttttcagaaaacccaactgggaatcaaatgctactgactttaataggatgtctcatatgtgaaatgaatgtctcttacaatctaccaatgatatttcttgaactctcaatagttcctttccttgagtaggtttgctaactctaccctgaaaaaatgcctaactgaaaccatggaactgctccaatacatttcactcatatttactgattctgtctcactttataatttaatttcttcccaagagttgcaaactatagtcaaaaaccagaatctctcaaaattttattctctctcttttctcaacattgttgaaataagataaaaagaaaataaaaaaggttatggattctaaaaaccaggcaaggataccacagacaaattttgctctgaatataaagaacaggacataatatgtattattcttatgaagtatgcttttcttgcaaaggtaaattttggatatgctgtaaaagtagagtataatataatttatagaccaaatggcatacttttgagagtcaaaaatatactattaataattacactgaacatcaggtatgcacaggtactatccaggccaactgggctgcatggccacatgatggaagacagaggtgaaatctatgttttggtaaataatcatgagaagacctaattaagagcatcatcactagaatcaaagaaatcttagagctgagtacaacttaagagtttcctagttcaacctacttattttacagaggcagcaaggccaaagtacaatgatgtgacccaagttgtccaagtcacatgacgagataggtggttgtgttgaaagtggaaaccaggtctcctcattcatcatgctctttccattatactacaatctctctacagtatgtatgtattctctatagtatgtatgtagcttgtaaaatattctcgaaggaaagaacaaaaagatcgtaaaatgtgctataaagaacattccagaaacgatgtcacaagcttgatcgtaaaagaaacagcacagttcaattttcctttctttgtggacaggcaaaggaaggaagtgttgtcctcttcatgttggcttacatgtactcatctcataagacattgcaagtttaattagaagagggggaacatttagcagccaaaaaacttgcatgatactcctgccacatgccaagaagctctcagaatctcaaagaactttataccaccaatagtttttgtgaatatttgctttctgagattagccttctggaaagtttcataaaatcaggaggccttatggaaacatttaaaaattaaatattccaagtaaaatgaattttataaattttataaattttatgtaatccacataaaaagtactatcaatattgttatattcacattaaaaaggaacaattcgatcagaagttttggtaaatgtccctattatttcttgatataaatcacatcttcctaaagtaaacattgggctgaaaattgattatcattcaaagcaaaacttcttttttttttttttacttttaaaaggatatttactttaagtaggaatataaacaggactttatggaggatattttgatgaacactactatattctctgagtctgtgaaaactgaaatacatttcttccctattactatccctgcaggatggctgaacaaacctcatctcatctatttgaaatgagtccaatttaattctgcctgaccaaaaatctgtttccatagttttaaaacatgcaatcaccccaaggtacattgccattgtagcttaagtggctcagtgttatcactgagaaaaatgcactttgattgagaaaacagtccagtgtggcttttgaaaaatgaaatgaccctttctgatacacaatttagtaagacagttgataaaagcaggcggatatggccactatagacaacatttaaaggaagatgcttcatccaacctgtaaaaataggtcaaagtttacagtttcgaaattaacattagaaatttatctcatatttaaacttcctggtttaaatattactgtatttagaggacaattgaaaagtcaattacgaattatggaaaattttcaacaaattattctgtcactcaaatataaataaattgctttcttccctaatgttttttccccatacatacatgtgttgttatctgtattcatatatatatctcactacttaagagacttttaaaacctattagcccaactttaaaatactgttgctactactgaatacttgtaacatattaagtcaaattctttaattactgtcactggtttattacaaagctaacaattttaaatatctatttttaaatgaacctaataatcttttatttaagtcaatatctcctcaaatgaaccaagtattcactaattaattagatcatttacatctataaactgctgctgtcttcaaacatgtaatagcttataataaaagaggctcttttcattggcaattaaggagcagttaactctttaccttctgcattttaatattataaaatgcataaatctttatttctgcatttctacgtatttagctttcaaatgaaacagctgttttgtacttaaaaataatatttcttaatatatgttactaattgacaaaatacataaaaccaatgctgataatattttcttcttttgggacacacctggtttatataggagatttggcaactgtaatctcattaatgataaaacaagactactaagaaaaatacctgattatttcaaattatattcataaaagcattcctaactctgaatgtcctcttgtgaattattttagataaaggaaagtctatcaatttatttgtttcatttttcctgtatcagatttactgtaataacttgcttatcagtaagtgaaccataaatctacagcagtaacaaatcattaatgaaacattagcaaagaatgttaaatggagctattgggcaaacataaatctttctaaagtcacaagtctttatccaaggaactaagtgctatgatgttattggcaaccttataaatcctaacgagagaaaatcaacaaaaggatcacattgcaggcaaacagtcctactaaaatgtatattctttgagggcaggggtttcgtttgctgttaccaatatatcctcatgcctagaaaagtatctggcacatgtagacagtgatcaataaatatatatttgtgaacaccctataagacatcccattttattttgtagccacatgcaaataggaaacgaaaagaaaagagagaaaaatgaaaataagtgcacatgtaggtacaatatatccaacactacatttaatttgcattttttgtattttttgcccatccctcttctaggacattttctcttcatctattctgttcctctcacccttttccattcaaagtaaaaatcagagtcaattttcttcattttctgggaaacatgttaattcatatttggggtgctgatacaaacagaatttgccttctattattttccttccaaactggatgcaggtctgtttcaaatgcaagaagtaaaagcaaatttaaatataattatcattcttgcttcttcagaatgcatttttctggaaaagtagggatcgtgtatttggaaaagctttaaatggcacctactgaatatactcactatcagtaaaacagaacaaaacgaaacaattaattttggaccaaggataatacacaattctgaaaaaattaacaactggatacatacaaaggctgcaaataccaacaggaatctaatggcatttgaacagcatctaacagcatttcgaataaggtttttttttccctgtgttcttcactgatggaacaccaatattcaaaccagtgcctgaaatgtagtaggcaatcaataattatgtcctgattgaattaacatacttccaagttgtgcaaatgccacatttaaaaatcatattcttcaaaaattttaggcacaagattgaaataagctaattagagttaattgtaggtgagggcaattaatcacatacacaaaatacctcatattttgggtttgtgtgctcagataaaccaatagaatgtttttttatttttaaataaatagtgaaagagtatacccatcattcaccaagaaagccacatggctggctatcaattcaaaactttaaacttcaaaatactatagaagtattgtactattaaaatatctcttttaagattaaatttgccttgattttattttgaagtgctgagcttaaacagacaaggttttcaaatatttcattaacttgttcatttaaactaaaaagtgaaaatcctatgtaattagcagacgatctactcagcttgggccagaggagggttatggaatcaagactatcatttagcatctaacaaaccaaaacaaaatcttttgtaaaagtccacaaacctctaatgaacaacatacacacatttcatattcaaacggaatgcattatgttaagctagtttcaaaggaagctgtagtgcctaagatcagaaaaatgttccaatttagaaaagacgcatatgcagaaaagcccactatcataaataatataggatgaaaatgaaggaataaaatccacaggctcacctggctaatgggttcttttgtcgggggctttcctcttctggctgtgctagtagccagggtcgtggtagtctccataattgatgtggacatctctgattgcatggcagtggctgttgactcagttgtcatagaggaaggcacttcaccaaccagtctcacatttcccactatggcgatgttggcatcgttttcggctgccatattcagaactttcaagccattgtagtacagcccagagagctggccctggaagggctggccctgctctttcccgccaattattatggttgcttggctattgaagattgtgagctgacgccctgtaaaaataatattacatacatgcaaaaatgttgattgtgaactctatatctacaatggatgataaaacagatcttttatggggtgaataatgagagcaataaactataagagaggcatttgactcataattcattgcttataaatgaggtgtccatgaaatgcataattattggcaaatacttgtaaattctcaacttattataaatgtagtgcttttgctaaaagaccaatcaaagatatgtattacaaatcagtttttagtggatcccttttcccttttacatcaagatcttatattgttggtgtctaaagtctaaattgttaaattttaaaaatgtaagacaacatttcaagtatttgtcattctgaaattaccactgacagaaactaatacatagcagctgaaatctaatttaaattttatggtaaaaatttcataattcacataatgtccacatatatctatatgttattctttagtgctgtttattttttgaaggcaattattcattgttatttgaattattctatttttccggcaatcacactgaaaagaaattcatggtttacactgagcatgtcagagacaaaaaaattccaaaaatatttttctgattggctttcagcaagtctatcaaaacaaaacaaaatgaaaaaaaaaaatagcttcagatgtaaaaagcggcttcaggaatgatacacaaaccgatggagaaattatggcacatttccatcaaacagcaatccttaataacagtaccattatcatcaaattgagtatccagttttagcagattgctctctgctcataaaagcatgcacacaactttaagttcagttttaatatgggcttgttcccaaatcctcttagaaggttgcaaatgttaaagggacttcattatgactggcaattcatattgcccactatttaagattcctagagtttaaacaaagagtttttgtttttttcaggaccataataaagatatcagaactacatatattttagttaataatttagaggctggaacatgtaatatagtctatgaatgatttatcattttgggttaatgcttgctgtgagtaccctcatagattgagttagtggattatatttaacagtccctttaaccttaagttaactgggtaagattattaaacagctggtacgtctaaaaatgtatagaaattattatacaaggtatgcaaatattactatctacattttactgttttaaagttgtttttaatttagttttacggaaaatttattttttatgtttattagtgttacaatgaagtactacttggttatgttcaaattatttttttatttgaagttttaatcaatgttttttacctttgtcgagtagccattcatcaactactcgaccaagtcgatatggaattcgctgtctagcaatcgccaggcgctcgttatcattgtttcctttaaagtttaaagagacatttcattggttaaaatctgtaaggtcaaaggttaaaagttaatacttaaagattgagctatacagttgccacatgattttttgaaatttggaattttaaaaagttctacctagaacatttcatgtttcagacttgtcattcattcatttattttattttagcaaacaaaattattcctatgttaattgaaaattagaaatctgcatttgagctaggttattaaacttatgttatagacagacccgaacaaccaatttaaacagcatataatagctttacaaaaaatgaccaatgacctcagggttttgtctttttgatgtttcttattaactagttaaacatgttcaggtgaaacaggtttaagttttcaaaatacattcaacctcttattccagattaataatttatgatcaccaaacttaataccatatttggcacactgaagcatctacaataggcctagcatactttatttcctagtcagaaaacagaaattcttattcacctcatttaagaaaacaacaaagtccaaatagttcttgtgtatttcacacaaattgatttatcaatcacttggacatcacaagagaatgcatcttgcatcatccagatacgttattacaggaaaaggctttgacaaaagtcactttatttgagtgtccttgagtttcatttaaagcttaacatgttgaagcaaataacatttgaaaaaataattatatgtatgtttttatatagtcaaatatctgctttttattaagttattctttaaaagcatgacagcttaaggaacgaatataagccacaaacagtggcccctattcatagatctaacctaagtgagagccctgcttctttgcataaaaaattatctgctagaaacactgtttaaattgaccttgaatattgcttgcaaatagatgagtgttttcttgatctgtagagcacttacgaagaatctgagacaccatctcggtgttgagttgtgtataatgcaagaagagattttctattccattagagttaactaacatggaaatttaagccaagacattttggcattagctcagatgaggactcagaggtgaaagaaatgttgaatggtagcactatctgcataaaaagactggagtgttttgttagagaagataaatgaatagatttacattttattcctctgatttacaataatttataagtgctttcttttgctactcttataatacattatacttaccactaataagcccagcataatactgattacacacttttggagagatagaaaagaactatcttttagacctcatcaatttgtcatctgaatgtctatatgactgaaaatatttcacacattaatatttaatttaaaatgtaaatatcaaagtcaaggcaaatataaagtttaatgaaaacattaatatgtatttctctgtattctgtgatcactaaaacattgtaaaataatattttataatgtgggaatatagttttgttaaactaataatttttttaaaaggacacaaatggtacaaaattccaaccctgtcttcattttttaaaagtgtacaaaatttgtgttctctgttgtgtgtttgcatatatgcatatttggaatttttttttaatgtaatattagttactttaggacagtgtgattattgatcaattacatgtttttggcttataagtgattttatataataagcatgtttgacatgtgtaatttgaaaagcaatcacaaaatattttcaaaaatacataccctttgctctatagtcttatttgtcactcaatactcataccaactcacattggcataacacttctgacaactttatgattaggtggttcctcatgtttttcatgctagagtcttccaatcatcaggcatgacccacattctctcagacaccatccgaatctaggtcgcaaatccctcttgcccaattactactacagtctattgacagacctctctacatcttctctgtgattaatcacacccattttccatataagccaatatctaatcatgtcacttgtctagtataacccttcccatttctcttaggataaaatctcagacccttagtgaaatttgtaagtacttccacaatctggtcccttcctacctccctgtcccctctcacggccatcactgcctcactctgctctttttatccttatgagacttctttcaattcttccaaatcttttctttcttctctctgggactttgcacatgtagcttcctttatggaaaatactctcccttgttcccacctcatctctatctttcattagctaaccattactaattaatggaatcttcttggtaggaacattgcttccccagaaggtattccctgatgtcatcaggttacattaggacacttgactatattatttgtagctcctgaaacatgccctttagaaagaagcattgaacctgtaatggcaaatttgatagtttgccttcaaactctgaatatccctccatgaggccaagtactatgctactatgtgcagtatttattatttcttcagtgcttacttgcacaatatctatcacatacaatcctattaatatctgtagaatgaggtagtcaagaaaaccttgtttttagttctggtagcttctgttgcactattaacacattcttacaacctaacaacattaaaaagaaaaagaaagcaaatactagtgtccagagaataaaccacttgtagctaagcctccctttgcactttccaaaggaaacaccataaacctcacttataattttattttttgatgaattgtcactgatttgaacatctctacaatcagttcattatttgtttaataataaattccccatgtcacaaaattggtaaacatagttattattagtagggaaaggttggggaaaaaaaggtctaaacaagacaggtagagaaaaatcaaagctttatagattattttaatgacttttaaaaagatcacataaacacataaatacattcacacatacatacatagaatttgtcctcaaacatttgactagtactaataaaataattgtgtgattgatatagtatgacagtatgatgtaagtcaacagaagctttggagatccttgctgagactcagctaaagcaagaacataaacactgaattcccaatgattaacagaggtcacctaacaacaacaataaaacaatttagaaaatcgaataggcagtagacacaagttatgaaaatatgtgataatatataagaaaggtagccacacaagggggtcatatcttcctactaccccagaatatcagatgcctactaattcagtgagcactgttttaaactgaagaactttttaattacaggacagactttattcttgtatgggtaatgaatggaaaatcagatggtgcttattcaattcaatatatacctactttattctctaaattctttgttctcctactagaataaaaaactaatgactttgttctcctattagaataaaaaactaatgacttttctgctgcaaaattatatgcagatacattgtgatatggtttagctgtgtctccacccaaatctcatcttggattgtcgctcccataatccctacaagtggcaggagggacccagtgggatgtaattgaattatgggggtgggtttttcccatgctgttctcatgagagtaaataagtctcacaagacctgatggttttataaatggcagttcccctgcagatggtctcttgcctgtcaccaagtaagacatgactttgctcctccttcaccttctgccatgattgtgaggcctcccaaccatgtggaattgtgagtccattaaacctgtttttctttataaattacccagtcttgggtatttcttcacagcagtatgaaaatagactaatatagtaaattagtactggtaaagtggagtactgttattaagatacctgaaaatgtggaattgactttggaactgggtaacaggcagaggatgtaacagtttggagagctcagacaaagacaggaagatgtgggataatttggagcttcctagagacttgttgaatgatgttgaccaaaaagtctaggctgaggtggtctcagatggagatgaggaacttattgggaactggagcaaaggaaattattgctatgttttagcaaagagactggcagcattttatgcctgctctacagatctgtggaacattgaacttgagagagatgatttagagtatctggtgaaagaaacttctaagcagcaaagtgttcaagacgtgacttgtgtgctcttaaaagcattcagttttattcatttataaagatacagtttggaattggaacttatgtttaaaatggaagcagagcataaaagttcagaaaattttcagcctgacaatgcaatagaaaagaaaaacccttgtcctgaggagaaattcaagccagctgaagaaatttgcataggtaatgaggacccaaaggttaactgccaggacaacgaggaaaatgtctccagagcatgtcagacatcttcacaacagcacttcctatcacaagccaggaggcctaggaggaaaaaatgtttttgtgggctgagccctgggtcttgctgtttgtgcagtctcaggactcaggtgtcttgcatcctagctgtggctaaaaggggcaaatgtacagctcaggtcgttgcttcagagggtgcaagccccaaaccttggtggcttacatgtagtgttgagcccgtgggtgcaaagaagtcaagtattgaggtttggaaacctctacctagatttcagaggatgtatgaaaacacctgaatgtccaggcagaggtgtgctgcagggacagaaccctcatggagaacttctgctagggcagtgcagaaagaaaatgtgagtgggagcccccacacagagtctccactggggcactacctagtggagctgtgagaagagggccactgtcctccagacaccagaatggtagatccactgacagcttccaccatgcacctggaaaagccacagacacttaacatcagcccatgaaagcagccaggagggaagcggctgtaccctgcaaagccacagaggcagagctgcccaagaccatgggaaccttcctcttacatcagcatgacctggatgtaaaacatggagtcaaaggagatcattttggagctttaagatttgactgccccactgtatttcagatttgcatggggcctgtagacccttcgttttggccaatttctcccatttggaacagatatatttacccaatgcctgcacccccacggaatctaggaagtacccaccttgcttttgattttataggctcataggcagaaaggatttgccttgtctcagatgagactttggactgtggacttttgagttaatgctgaaatgagttaagactttggggaactgctgggaaggcataattgattttgaaatgtgagggcatgagatttgggaggggccagggatatggtttggctgtgtccccacccaaatctcatcttgaattctagctcccataatccccatgtgtcatgggagacacccagtgggaggtaattgaatcatggggacaggtttttctcatggtgttctcatatagtgaataagtgtcatgagacctcatggttttataaaggcagttcccctgcacatgctctcttgcctgccaccatgtaagacatgcctttgctcctccttcgtctttctgacatgaatgtgaggcctccccagccatatgtaactgtgaatgcattaaacctctttttctttataaatcacccagtctctagtatttcttcaaagcagtatgaaaatggaaacattgtgaagacacatctaaataaagtacagcgacaatgtctttttaatagatgattccccaaatccttccaccattaggtataaaatagttcagaatgtttaggttctccagcgactaggcctatatttttcctttacctcatgattttcataaaaatgttgcatactaaaaggggtaatggaagtatattattttaaataatttctcaagatgtattttatttctttacaaattcatggtgatatttacttgtaaaatatcattcagtagctttgcatgattttgctgattatatttaatactgtccattgttcaatatacatctagaccttacatgcaatataaaggatataaaccatttgattgggaaaggtcaaaggcaaaaataatttccaatgaccttttcttttctttggaaaggttcaggatctaatatcaaatatgctgggatatagaagctttacatacagcatttgtgaatggtcagtgtaagcaggcttaagctggtaggtgagatgaaaaacaagtggaatgtccctgaaaattcaaatcaaaacaaagttgaatctttcgaagaagacatttttaccttcaagtattctaaatcagaggtaaggataaagcaataaatgacccacttttcaaagatctatacattccgggctataaaaagggtccaaaaggaatttcatctctttctaaaagcataaaactctactatagcaacatgctgagcaaataggcttgatttataaaagcagagccttctcattgaatagttaaaagataacaatttagtctcacacttttcccatgataaaagcaagataggattttcctttgatttctttttcctccagttaattttgtgtggtttgatctgttggtaccttcactgaaaatgtcagtgacaacatacatgcctctgccgaagtaattttcaagcaatgaaactgcatgtaaaatttggttttattttcctttgaatttcaaaaagaattaagtatttttgacaggaggaaagactcccttccccccaatccctgtagtaatgccattgcaacaaggtacaatctctaattgtaaggtattaaatgtcattgtaaggtattaaatatcattaatacttcaaacaagtttcctggggtgaagaattcaaaggaaaatctgatggcttatatttggaatgtataccctctattttgattaaatcccagataattttatttgcctatttgtatagactgaatgtttgtatctcccaaaattgatctattgaaaactaattccaaatatgatagtgtcaggaggtaaagcctttgggagctgattaggtcatgaggaaagagctctcattaatgggattagtgcccttataaaagaggctccagaaaactcccttccctccttctgtgatacgaggatacaatgaaaagatggtcacctgtgaagaatgaagcaagccctcactagaaatggaatcttgtacttcctagtcttccgaattgaaagaaataaacttttattgtttttaagccactcagttaataatattttattatcattgcccaaatggacaaaaataccatgtaacaatatttggtcacattttagtctatttattctatatgaacaagcagacttccgggaaatgagagtaattacaaagaatcaaggtaagtagcacaaagcaataaaactcaaatccttgacttggagttaaatttcatggtgtgactcagagaacaaagataaatacaattttaatcatattgttataactatcgatcagtagagacaagctatatgaacatcactgatgtatagtttttctcctttcattttagttcttcactcttgtgtaatttctcctcagaaataaaagtgtcagcatttgatatgacatattaatatctatggggaaaaagtaaagaaaaacaatgctatgaaccaaacatttgtgcagaataatatgaaaataaaaataacaagaacaaaaagagacttgcttctttggaaggcttcttatttcttgagtttttaacattgggaaaagaaacacaaaaggattctgaaagtcatctataccacaagagaagattagtaacctgtgtacagactgatttttaaatgagaacaagacatttggatatatctaggcccagaaggcaaagtaatagttttgtaaacatactctgattttaagtgcagcataatcacataattttcaactgaatgcaatgtgtattgttgtcatatagaccctgcaaataccataatgcctcacttggctgataatgttccaaataaatagattttgaatatcgacaccttttgagaaacaaacttttgaaaaatatagctattctaataaaacatttgtcttatatattactttatttcctatatcattaaaatgtaaaagccgaatacacatatataattggctccagcttactccagtttcatcttgaactacttttctctgactctttaaattagtcactttgtaattttttcaattcctttagctaagccaatccactttgaacccgacattctcctttgcattgcgaatttcttgcatccctgtgtactcaacatctctgcccacctcaacagacacacacacacacacacacacacacacacacacacacacatctaaggctggctaaattttttcttttttaaatatcagcttatacatttctcaaggaagcattccctgtgtcccctactgctccaccaaattattctacttaatgaattcttccactatgcattcttaaaatacttagtagcaatatctataatcatgatcaaagaagttcatgtaattgattctagattctagattccttgtgagcaggaaccatgtctgtcttgttcaatgctgtacgccttatgtataacacaatggtgagcacatggtaattgcttgttaagtaatttctaaatgaaaactgaacccatacagttatgcaaaaaataccacttgaggtaattttttgcatgataacatagtggtatttcttgttcaagatccataaggcagtgagattgttagtgtccacttacatatatgtatatatagtcacaaacaccattggattgtgagaggaatagaactttgcaaaacgttatagtaaattttgcttggacgtcagatttccttttttcttcttgaccatttagtgtccactaattacatatgtgtgcatgtctatttagtttattcagtttaccagacactaaactaaatagagataaaatatgtgtctctatatataatatatataattactgattcattatatatataaaatgactcagtaactctgcttatctttcatcaattttgaatttgccattgtagtacacaataggacaaatcttttaaatcttatttttatgattaattacaagtcaatgatttatagtctgaggtgagctctactgtggtgcatacacattagcagaaaaattaataccacgtgggatcttctttttttttttctaattgtgtagagagctgatcatgacaatctttgatttggtcagggggaaatttctgcaagtgcttcaattctctaatgactgtgtacaagaaacagtcttggacttgatgaaccttcaaaatatgtatcatctccaagactatattttctagatgaattttagtggtgaattctttcaaataaattgaaatgttgatactctggtttctcttcacatcgtattaatcttttactaaattgaatcttttactaaactgaaatgttaaccctccaaggagcatttacttccaaagttcatcaataaatacatcaatgccttgtaaagaaagcaacattcatttaaccaaggcaaaaatgatacaaagttgaagcttataaagtcaggtagtagaagttatggatcttctagcctttgtaacatgagggcagagggcttctagaatttgcctgatttgtggctgataaagagcagcgaggggcttggattgtcttctggacttttaagacctcactgaatgatgaacacacactaccagaatcaaaggatggtttttgtcagacagcaggactagaccagacagtaaagctacaattaagtttcatgcatgctgggaaatccagtttttccgtatgaaagtggtctgtaggtaaagaaactgaagaaaacaaaggaccaccagaaaataagaaaataatgtattgagtagcttcatgttttatgcattgtgttacttgcttatttaggttatcttgtttaatgctgatattgatcccagaccataagtaccttttattttactgatggaaaaactgaggctcaaagagatgacataaaactaatgctgcatcatacatcatagaaagagggaccatttgaatcaagataaagctgactcgaaagttgttccatggaatagttataaagtaatatctcttaataccgtgagtcataagggccaacatcttctccttaatccttatagcactcttttgtataatgtaagatgtcattaaggcttgtctacaaagtttctgtcttctagattctggggtgagatcgcccttatggacacatgaaatcagtaatcttccctaaatcctcaacgatttatcaggaggataattttatcatctccattttatagattaagacagtgaagcagaggtaagtaaagtgatcaaagacctataacagtggagatcccagtgagaagcagtattttgttttttttccttttataatgatgccttgtatgcatagctactggaggcataaaatgttccagacattccttgtctttacctctaacctataagaaaagccacaagcataataatccactaacttcagtgctttttggacgttgaacctctccagaaacacgttggaaatggagagaggatcctagttgtgacacaaaagaccactgtacttcattgacttgtcagagaaaaagaatattgtaacatgttacagtaaattttgcttggacgtcacatttcctcttttccttcttgcctatttcttatctctgcgtttccttttacacagctccagaaacccagtgctttcatgccacctgtcaacaactcaaggcgtatatttacaactgcggttcctacacatatctcatgttccaaaaatacttcaccttccttcttctctagtgccaataattaaaccctggtttctttagtatagctcggctagatgttagaaaagcaatcggactcaataaagtcaatatataagcagtgcccatgtactctgaaattattgtactctgaaaggcacacatcaatacatcacatggattctattgttgaagagcttacacgttgtctagggagtcaaggggacaaatgaggaaagttaaaaaataaaagatttaagtaaaagttcaagataatagataatgagacataagtacgcaattaaccaccatgtgaagtgtagttgccatagaagttcagagagaacaatggattagagcaaagaaggtgtgatggaacacaaacgattgcacctagatcacaatcaaaatgtcattgaaataataatgagctaaaaatttttcataatgtgaatattaatcctcaaaaggttgacaattgatcattatcctgaacttcataatgctattcacccaacatctatttttaaataaatagactctccaataaaacatatttagtctcaaaatataattacaagtatgaccaataatggttaaatattcatgtcacgaaccatgaaaaaaaagaaaaaactctcataaaactactaagtaaaatgcactgaaaatcggcaagaatttgagggcaatgtgtaaaagtgaaatatttgtgttaggatggagaaattaatggtgaccttttttcaaacttcaattttatattattgatactgcatgtatgcacatttcaactttgttcccactgcttccttaaacacatacacacacgctcatttctctaaattaaatgcgatatattaatgtaatgctacaggaagagggggtggtgcaactcaagagttctgtcagtcattctcacagctagaaagagcacgcacagctcaagtagggtgatgcgctgttcgtgactaatgcttcagatgacatcccagctccttatgtgaaacagcaggcttttatatccagttaaacaatatattcatgtgagactgctgtgatgttgggcgtagaaggctgcaggctgtctactgcagagttcaatggtgctttggggaagaaattagaatcttagtgcatgtctaactagcttaagtaatttcttccttcacatccctctcttatgtggatttacattaagatatctaagtgttttacacaaagatttgtacaagcacttgttcccactagctacttacattcaaaaattttggtttggatattgtttcatcagattaatttgaaataaatacaggtaaccttgtgaattttggatctcattgcctgtgtggaatgaacagtgatttaaattttcttccctacacctttaaatgctgtttgtttcccattgcaaaggcactggagtatcatatcaaaaaccagcagcaagaaatgaaaagcagcagggacaagcaggtaacaaaatacagaacttactctgataaattaaaggtcatactctgttatcatgcatactaaagagttattttgtgccagttgtgtagcatttaagacagaagaatggtttaacagctacaaaaacaggcagagccattgatagacatcactaaatactgagaataagaaaaatgaaaagtaagagcagccccacattaccttacaaatggcattttgccattttcccagatatgagaatcttgagtactttctaaatcataatgtcataacatttaaacctatccgctctaataaaaacctaaatatatattttttctaaagtgtcttttcccagttcttgttttttgaaaattggaaaattatgtggttcagctgaaatttctacactccattatcagtcttgacttttaatctagtcttcttaatattcaaattggtccacggaaaaaaagataggtgaatgtttcatacacagtctgatgtggcctataaatggaactgcgaaagttccctattctcaagtggaaaagaaaagtctgattattatgacattctgatcttattttcaatggacttcaatctctctcttccagttgtaactggaatgcaagatttttttttcaattagaaagatgaggtttgtccattgtatgcaaataatttaagattaaatggtctggaattgcaaaggaccaagagttggataaaggtgctggataattgctagccccattcaattttataaaatgtaaaaccactgaagtaaaataaccatttttttctttttgtagataaattgaatactatggatatgaatttaaattcctaaaataactttcccctaatacaagttaattttctctaccaccaattatttcttaaaagtaattatcctgtggtcagaatcactgaggaaagagaacccttgatggttaagataatgagctctaattcctaggttcaaatcttggcttcaatattgactagctggatcagtagcataacatcttttaacctcagttttctcatctgtaaaacagatatttgtaagaatagtatccataatatatgccaatctcttagcacaatgcctggcacatggtaagcactcagtaaatattagcccttatattgtagtcatgtcattgtttattctctagtatgatgtgccttacacaatatatctaagaatgtgtacatcacaaaaaatattttttttacccatctgatcatagaaagttgaagtaaatgtgaagaagagtggaaaataaatctattatctttcccagaatgagtaatggccaaagagtgagccttattatgagtgatatcccgaacgtaggtgctttatcaaaatcactgcactttctcccaagcaatgtcatctttattctcagaggtttatgcatgctacttttaagtcaatgggaacaactgaaaagaggtcattagctggaagaaaccacacaaaaagaaaaagccaacagcccctgccctgagggaaaacagaattcagggtactaccatgtgttctgtgacagcagcatggtgacaaaagctgttcccagaataagaatactttggatagcaatgaagtcttaaaatgacattttaatccatatattaatgcttcaaagggatccacttcaactagaatgccttaactcttctttttgcccaataatgctcctggcaaagaagggccacagaaaccatgaacaggagtggatgctgcttgatccattttctgcaaaatgagatttggggactggatggcttctaagctgaccctcaatgctaatggcccatggtcccaggtatcagatggtgttgttgtaaagacaagcattaggccaccttgttaaaacatggtgattgtggattttcatgaggaaattaattttagagccattaaaaataaaataccataaatgttttttaactcagcaaatatcttttaaaaagcagtgaaatatttggcttgacatgttcttttcttcatctctctctgtttttaaaactaacttatggtgccttgacaattttatgaagaatttcagttggcatctgtggagatctttataattaagccattacatttttctgaaacgtttcatgttttaagcttgtcttctttccactttgtgctatacagacacacccacctcttatcactgagacatttctctgcattctttctacccatttaccacagcatgtcatggttttgacagccatcttaagaggaggaaggcagacataggttagatttcaggagattttgggggtttttttttttttttttttttgagacagagtctcgctctgtcacccaggctggagtgcagtggtgcgatcttggctcactgcaagctccacctcccgagttcatgccattctcctgcctcagcctcccgagtagctggaactacaggcacccgccaccacacccacctaattttttgtatttttagtagagacgggttttcaccgtgttagccagggtgatttcgatctcctgaccttgcgatctgcccgccttggcctcccaaagtgctgagattacaggtgtgagccactgcgcctggccgagatttcagttttatacagagtagttaagacaatgaaggacaaggcattatgatactaggaaatagagaagtttgtctcctcttcatttgaaatttttagcactaaagagattagatcagaaaaatttaagaagaaatctgaggacttcaagtcaatggctgctctttgcaagccctttttgtccaaagtgtatcaaaataaaccttttcttggattgctgaaacacctgtgatcatgggatcagtacttttggagctatttctggttcaagagacattctcatgagagttcctttccaatcaaatctgtcaggggctgacttaaaaacctgtaagtgggccagacacggtggctcacgcctgtaatcccagcactttgggaggccgaggcgggcggatcacaaggtcaggagatcgagaccatcccggctaaaacggtgaaaccccgtctctactaaaaatacaaaaaattatccgggcgtagtggcgggcgcctgtagtcccagctactcgggaggctgaggcaggagaatggcgtgaacccgggaggcggagcttgcagtgagccgagatcccgccactgcactccagcctgggcgacagagcgagactccgtctcaaaaaaaaaaaaaaaaaaaacctgtaattggctcagtgtaactcagactaagtagagatcaccaattaaaacccaggcatcctaaataatgcagtaggtacagaggagaaatagttcattgcataaaatatatcagaataaaactataaatttctctacttccttcagtatttcttcttaaacttaagctacctgttatttctagtgatctctaaatgcagaacagaatgaagacaagataaaaactacaaagatatcctatcaaatttgagctgatgctccattactaaggacaattggaattgatgcacacacatgttcttctccatcttttttatagcccaatagatctacagttaggctgtgtcatatacaagaagaagcctgaactaactaggccgtataactctggcctgattaacactttatctaatactttttctgaagtcttttaatctaagtcttgttttgacttcattgaaaataagcagtttgttggtaatcgccacacaagaaccctacacatacttaaagactgttatgagctcaattgtttatcccccaaattcatatggtgaagccttaacccctaagacctcagaatgtgatggtttctggaaacagagactttaaggaggtgattaagttaaaatgaggctgttacggtggatcctaatgcaatctgactggtgtccttataagaggaagactggacacacaaagagacacaagggatgcacaggcatagaggaaggactatgtgaaaacccagcaagaaggtggacatctgcaagcaaaggaaacaggcctcagaaggaatcaaacctgctgactacttgattttggacttccagcctccagaactgtgagagaataaatttctctcatttaagctaccactctgtggtattttgctatggcagtcctagcaaactaatacagagataatttaaacgtagtttgaaataatatattgttagtttattcacagatctttcatattaagatgtgatagtattttgctgccagttgctaaaatagtctaaaagcgagtactcatggatttgcacacagaataaagctctgtgttaatgtcaaaatcatgtccattttaattattaattttagttaaaatgtattttgtcctgttctggttttgctgcaaattgtaatattctacattacagtcctggtaattagtacagttaccaaataaactctatccatgtacattttttgcatgactaaaactataaaataatattattttcatcatgaaatatacatgattatatgtagttccattaatgtatatagaacaacttttccaaaaggaactacttaacctctcataccattaaatgaattttcttgaagaaaacaaagtattttctactaccattttcttcactttgtggctccttataacttccctccttgtaacacctgctacgcggatgactgcagcactattaaaaatttactgtcagtgttagctttccaagttatggaaaaagtctcagtgcaaaacaaacaataaaagcaactctgcataagacaaatccttacttatgttaatgattacatgcggtgacattgtcttatttaaatatgcttatattttcttcaatttggaaactactgtgagatcccaaaagatacactgtgtccacttcaaaaactctaaaattctaagtaccaaaggacaagcacatatttattcacactaatttttatccttaggaactgcctaagaaatttaaaaaaaaaaaaagaaaaagtgattttgagagattataattagttttgtgaggcttgctaaatagtcatggcaaaaaaaaaaataaaacagcaactttcactgttaatttggaatgtttatcttctactcaaaactgaacgaatgtcttacattgttgtgctttttctttggtgcttatcactgaagaagaatgccaattccaagcccaacttggacatatacctcagtaaagctgccctgcagcagggctgaccacctccactgaaaatgcctaggcacagtgaaggcccagcaagtggatgacggcatcagctggtcctaaaacaaaaagacttgagtactatatggatgtaatgacctcaagatcccctatatttcctaagaaattagacatagcttcatcattttcacctatgaagacaaacttcaaaatatttttggcctgctttttacttaaaaaaatgcttatgaaaagggagtggacaaactttgtctatgcctttgtcttctgctctcttttgatgttcctggagcctatacccttaggaagaacttgatcttgaattacaatatcagtgtccttcaaattccacttcccgtgttatagtaagcaatgcctggactgtcatgtcacctagcttagctccagacatttgcagacatttattctggcccctttagactattccctgcactttagccagaaaaattatttgaaatcatgtgttatctgcaacagactatgtgttccaagggggtagtgaccattcctgcactccatgctgtatccctagcataagtccagacacatagccggtcttaaataaatatttctgaataaattactgaattcactgggattacctctcctcagtctcttctgtcttccactatcctttgttctaacatggcttatcaatcataattaacctctagaatacttatcaggcctcactcatgcttccagtttcttttccatgatccagacttactgaatttgccttctattcctttcaaatcctgctttttgctggcgaaaataggtagtcacagtagtgctcactttttttaatgcagtagaaaaagagaagcaatttgacattaatatttagatatggagttaacttccttcttgaaacttgacataatgactctctgctaatcatttgtagagatagtcaacaattctagtttaggtaggaaaattgagaataaaaaaaaagcataggcctgttaatctctttttaggaagagtttgagcattctgattagaaacagatgtcatataagctcttacacataaatgagtgcactattagtttgatattttatcgagaaagaagcaacatgaagaaaaataggcatattttatagcaacttggtacttaatagagtttatgccaaaggaggtcagtgcaatgcattttcttttttagtttttgtttgcacattttttaaggcctggaaagtatgagggtatgagtaggatcccagctgtgccaattaatgacacatataaccatagatgctttatttggctagtctttaaaataaacaaaaaaattataggttgccagattttttgaggaagaaattttctttgatgactgagctaagggaccccaacacagtatattatcaagagtacatcatttttaaaacattttatattatcactataatttaggtaaaattatagtatattagcactagatgatgtattcttcatcaaaaatgaaaagtttccttttagtagccatagaaggaagagttcccaatttaaatctcacgaaatcttgctttcttaaatatgtaaaatataacacaagatttatggaaaaaggtagtcaagtctatttgatttttatggaggctagaacattccagattcaaatatcatgaataaactcataaacaagttactatatcttctgtaaaatggggataatttatgaggttacttttaagaataatatgtaatgtctgtaaagttgctgggaacagtttctggcacatatatatgatggctactattgtttttatagattacatagaatcacagatccttagaaataaaaacaacttgagctagaatctggtgtaattcccatccaatgcaggatgatttgataatcttgacaaattggtctcttgagctctatagaattagaacagagtctaaaagttaccatagcccaggaagagttgaagtacattatcttataaaactactcttgttcatgctatttcctttctaaagtaaatgtaaaaagtatggaaagagcatcatcacaaattgtgaatacaatggagcttctcattttggtttgttttggtttggctatacatgaaataccttaattccattcagtcattatgcttagtttatcaagttagtggccttctggcatattcaatacatacaacggtaaagttcacagtgtgaaacttaaatgacaatacaatgaaaacacaaacagatctaatcctagatttcctattgcaagggcaagaaattgagaacactgtagtcaggaaaatgtatatcaggaaaatgagatttacaaacaatttatatgtatagaaacaaaacaattaaaatctgaaacagactccaaaatgtaaaatatctgacctcacagaaggactttgaaccctattatacacctttcttcatccatgcaaattctatttattctattagtctactttgacgagtcactgaagaattgagaggcaggaaaatatatgatgaaagcaattttaaaaagataaacatcttggctgcacaccagatggattaaaataatggagactggggaggaatatttattgtttatagctgataacaggaaaagaggcccaattgtgtaaaaagccttagatcattaaaataatgtcagcccaagaataaatgcctcaacaggaataaactgaacaccttatcataatcactaacttagactgagtctagtttctccaggtaaaattcaggcagtagtctcagctctaccagtaggcactgcatattacaggaggtgacaaatgttccagattgcctcaaatatcttggtttgttcctattatataggagtaactatcaatagtgcttctttttttatcagaattgtgtctgtttgaatgataatttttatgatcttctaattatcgaatgccactgtggaaatttaaaaaagaaaactttcctggattgttatagcttaagcaaaaggcttgggcaatcccaacgtgcttggtgacaaaggaaaaaaaaaacagctctactttcaggaaatctggctatgtacatgcacatgacttggagacccaagcacagactgtatttcagcctcgactcatcccctccgctgggactctggggcagcacccgagctgtctaactctacacagtgccctgtccaccagctagcatggtttctctaatgttcatttaccaaatttcaaatgaattccttagcacccagcccacattttactcttctgtgatatcagccttgattactgaacaccattctgttttctaaaattgtacagaacatatattttgtgccactcatttgaactatgtctttcttagtaatgtcttcatagtgttttgcttggagtgggtttggggacagaagcggtactgcacttaatgtctgccagggtcaggaggaacaatcttaagtttttggaaaggtttgtctccatttatgtgaactgaagtctgacagccaagagaaaataaatttgttcccagaaagaaatacaaactaatacggggaggttagtgactattgcagttgcaggattgcaaaactaaactattttgactaataatatagtggaattaacttttactcagcacttactacttaccaggtttttaccaatttctaactgttttgaaattaataactcatttaaacatcaaacaaccttatgaggtaagtactgtcattgtccccactttttagattaggaaaatgagattaaagaacttggcaaaaaatttcacatctcatcaatgtttgaactaggatttgaacccatgcagtctggcttttgaatgttccctctgaaccttcatgctaacctgcacacttaacttgcattaagtttgtagcatatgtctggtttgatcatttgatgtgtggtatatattcctacagcaattttagtcattaagaggagtattcaagttagacttggcactcacttctccatctagacaaagaataaccagcagacaggaagaacactattatgagaatgcttctaatcacaaaggacccctaaacagcccttacagatctgaatagaagaagtaataaccagtggtatcacaaccttagcacaacaaaggtctgagcatcatctgacctggtgaggaccaacaataacattttatgaattattttttaggggaattaagaattatttattaggcagcattgcataatcctacaaagcactggagtaggctttagaacctatggtgttggcaagtaaatgaatctccctgtgtttgctcatttatcacaaggagatactgtaagctgtcttataaagattctgtgagtgttaatgcaataatgtttgtaaataaggtatgtaaaataattagcatattgccccatatagagtgcccactacagactgcatgtctaacttattgtttcggatactagctcttacaaataggcaggaatttcaaaaggttctatgaatgtttggaattttggatgagttctgttacctcttcaccccaatgctggcgcaacatgaatttcctttattgaatcaatttgacagatttaacattctatttgaactccatttccataaagcacaggcctcatctaattatccccaggtctgccttctactgtgattgtgctcattctgcctttctttttttactaaagcaaatcttttcatttaaaaaagcttccttttgcttgtttcgcctctaaccacaaaatgcactctcgtccaagtcctctgccaacctgagcaataaaaataataaatgagacaactgaagactctacttggacctttaaaatgctccagcgaaggtgaccctgaaaaattattatggcatgttatcaattaggtgacactatcaagaaaaatgaaaccaaaatattcctttattctgcctgattttatatctcataaatcctgctaaaatacttcattggaaatgcatatggtaatatctagacaggcttatgttagatatattctttttggattctcagtggacattttacatattagggccaccaatatagataatatgcccaagatgacaaattacttcaataatacttaacatgaggaaagtctgtctcaactttgcggggaggggtaaacacagctgctttttaacacagttaaattcataaagctaaaaacaaaacagactttaaaatgtttaaaagtctgtctttgagaaatattctacccatgaggctaaatttgacacaaaatattcatcatcataatttaaattttaatatatggcctatttaaaggcttcatacttcaaaaggtttttacatttattttgtcattctgtcttaattaagaaccaactccagtattagattaagttacacctttggattgttagaaaaattaggttgctattcttctggaataaatctacttttccaataaacacatgaacatgtcaaaattttttttaacaacaaatgcatttgacttacaattacacaaaggcattatgtttaattatttttttctgaaatgttatatagaattgagtaaaaggtatttttaggtggaaaccatttctaaactcttatttcaaaaaaaaaaatcttatagaatgagagttccaaatacctttcattcagctttcctcctgttaataattaaataaccattaggcagttatcaaaaccaagaaagtaacactgataataaactgttgactaaagtatacactttattttgttttaccagttttcaactaatgtcctttttctattgcaggatctaacccagctcccacattgcattaaactgccatgtttcctttgtcccttcagatgtgtctttttttgtaattcgtgtagttaacacttttgaagaatactggccattttgtaaaatgtccctcaattttggtttgtcgtagttagatggaacttatggatttttgttgagaatatgaataccaaagaagtgaagagcctttcttagcatgaaggttcatgaagtcaatattttttattactggtgacatttaacttgatcacttaaggtgatctgctgagtttttctgaagaaagttactacttttacttggaggaaatatttttagactacataaattactaatttctactgaaaactttttcgcacttattttggtatctattagggaatcccgacttcaacaatttttacattgggattctaacgatgaattcctatttccatcatccttctacattattaattgtaatttttctgtatgggtgagctgtctctgcttccctatttatctatctgtatatctttctttctatctgttcagttacttgtttatatctctatgggttcatagatgtttattttactcttttggttataatcaaatgacatatctattagttttgttgctcaatttgatctagttctggcccttggaagttttttcggattagctcttacgctcctttgtcatgcttctctctcaggggtcaataaagtatgccctacaggtaaaatgtgtccactactatctatctaatattgtaaataaagatttattggatcacagccacacccattcattttcctattagctattgttgcttttgagctataatggcagaattgagtaattgtgaccatgtggttctcaaagccaaagatatttaatatttggccttctatgatgaaaatttcttgatctttgctctaggcgaattttctttttttaaattatgaactttgaatagtgcccaaaatgtatttaattgttatatctgaggtactttagaattcagactcttgaatgtatatttttcctatattctcctaacttcattagttgtaataattttgatgctagacatttattattttgtttgaagaaaacaaaatggattatcagtattctattgagtttaaaatactaaatcatacagaataagaaaataatggtgagacaaagttgaaaaattatctagtaagaggagcgaaagagaaaaattgtcctcttgcatgatatgttttaaagtttcctaaatacatgcaaaggcctttattaacttcttcccataataatgaacggtaatatggtagtctcctcttattctacagtttcagttacccacagtcgaatgcagtctgaaaatattaaatggaaaattttagaaataagcaattcatgccatttcagtaaatggcatgcaatttaaataataaagttttaaattgcatgccattctgagtagcaagataaaatctctggccatcccactctgtccctcatgacacatgaatcatcccgttttctagtgtatccacgttatatagtcggttagtcacttataagtagccacctgggttatcaaatcaacagatcacaagaagaagggtgagtatagtacaataagaaattttgggacaaggagagagagaggaagaggccacattcgcagaacttttattatggcatattgttacgattgttctattttattactagttattgtcactaatctcttatcatgtctaatttatacattaaattttatcatagggatatatgtatagggaaacacatagtatatataggttttggtactatctgtgatttctggcatccaatgagagtcttggaatgtattcctcaatggatacagggggattattgtactttccagagatgttatattgatagcaatttttatctttatgatattggacacagttatttcaccatcccacttcacaatcatgagatgattcactgagagacctttccaaatgaaactctgaaaccatgcattttggttttaaggatattcattatgtaatgccccaatgttataattatatcaagcatagtatcagtgcttaaaataaatttattagaaggataatggcattcttatgatcctattttggagaacaattgttttaaactggaagtacaaaagttggtcctattctgtgaaaaaaaaattatctgagctagtaaaggctacacccagagggctatgtcagtggttagaaggttattagcaggttagtaaagggcagccacatttcattggaagcatgtttaattaggggaggaggaggtttctcctcatatgttcattacacagactttattttttcctctaatatctcaatatcctcaaagatcacctagagcagaggttctgaattctaggtaaatgggcctaaggatgcaacccttaaacataacatacataattttgtatacaaatgtagatagatgtgtatttttctaaagatagaatgttctactttattggattcctatggaggcagagattcaaaggaagttaagaaaaactgatctagattaatgtctaaaactaaatacagttacctaagctttatactctacataggaccttgacaccagtgtatgatattttatcctttttgatactctgcctcctcttgacggcactttcatttgtttattagaagttaagtgacattaaaaccaacttattcctggccaggcgcagtggctcatgcctgtaatcccagcactttggggggctgaggcgggtggatcacgaggtcaagagatcgcgaccatcctggtcaacgtggtgaaaccccatccctactaaaatacaaaaattagctgggcatggtgttgtgaggctgaggcatgagaattgtttgaacccaggaagtggaggttgcagtgagccaaattcgggccactgcactccagcccggtgatagagcaagactctgcctcaaaaaacaaaacaaaacaacttattcttgagcttacaagatacgaaaagtgggtagacagtggacaaatataaatagcatgaaaatcatgagacttgttcatagttgacattcaaataatgacattaaagctgagaaggaacaaatcacatagtacagttttaaaaattgttcatcatacaccaaaatactagctattatgtattatcattataaaaatatataaataaatatgtctgtgctatttaataaaagctcctgaagatataagaactcagagtgtttgagaaagtattacgagaaaggcttgtcattgagttgggaatgtgacttcttcttccattaaagtcagctatttataaactataaactatatgataaaacaaagatacttttaggtaatagtcaaattataaaagcgactgttataaaatataaatattaaaatcaaccaaatacttgtaaataccatctgaagtttcctaaaaacctaatactctttaatatgtcattttttccggccttcagtgcttagctattcctataacttgtttccacctcatttcctaaaagctagatttctgcattgtagtgacaattaattttttatatctgacatgattaattcattttttgtaaccagtagttagattcattaacctgattacccgtatctttggtgaaaagtccttcaagacaatctcagccaatatctttagccacacttatttaaaatcatgataatgctattctctgtttaacgtgactacttttcaggagtgagaccagtataacccttcattatgataagaacttaaattgctaaacaaattgtatgttggaaacaataatggcagacaagaagttaaagggggaaattttatgaaattttatgaagggctgctatttgtatattacaacataagatatacttggcaaaagttcttaaacacagtaatgattaataaacatttctcaatttgatttgatgggttggtttctaagtaatttgttttcagaatctgagaacttttaaaagtaaaaagttcattaaaaactcgcaaaacagaataaatttttattgattaaatgtttcaaaatatatttaactcatttttaaataagcttaagtttagcttcaaatacgtaggaaactcatgagttgctatcctactttattgagctcttgttttctgatagtgataataaaggcacctatcctccccacacagttgcaaaaaggattaacttaagtgagagacaaaaaagtactaggagaaatcgggaaagaagaggtttgacttacatgtctctatgtcattcccaatagtatccaaatagcagatacccaacacgtatctgaagaaattaatttctcagattatttcaattttgtcagcaataaacatttaataatgcatttgttttgggggcaaaaaatcagcatattctgaaagcagaaaaaaagggcctgtttgggtttcactgagctttcagaattgcctggacaattatcaaattggccctgtgatactctgtatgttagcttctactacaagagaactttatgaaagtcactgataggtctcattgacaagtttcctgggatggaacaaagaacatttccataactacatagcaataatggaacaaaaatggcaacttacagacaaactacaagatttcaatttaaggaatgaagcagttaagcctagttgatataatatcctttacttctgttttaccacaactcttagaaaacatctgcattatctgtttgccaacctgtgtagtttaaatgatgccaaaacccatcaaaccatcagagaatcttgctctctcttttaacagaaaataaaaaaatgctaacatggttgtgtgtccagaattggtgggttcttggtctcactgacttcaagaatgaagcctcggaccctagcgctgagtgttatagttcttaaaggcagtgtggacccaaagagtgagcagcagcaagatttattgcaaacagcaaaagaacaaggcttccacaacacgcaagaggaccccagcaggtggccagggctggctcgggcagcctgcttttattctcttatctggccccacccacatcctgctgatcggtccattttacagagagccgattggtctgtttttcagagagctgactggtccgttttgagagggtgctgattggtacgtttacaatccctgagctagacacaaacgttctccacctccccactagataagctagatacagagtgctgattggtgtatttacaaaccctgagctagatacagagtgctgattggtgtattcacaatcccttaggtagacataaaggttctccaagtccgcaccagatcagctagacacagagcgcagattggtgcatttacaaaccttgagctagatagagtgccgattggtgtattcacaatcccttagctagacataaagattctccaagtccccaccagattagttagatacagagtgcagattggtgcatccacaaaccctgagctagacacaaggtgctgattgctgtgtttacaatcccttggctagacataaaggttctccaagtccccaccaaactcaggagcccagctggcttcacccagcgtatcccacacggggcggcagatggagctgcctgccagtccggcgccatgcccttgcgcggtggatgagactgggtgccgcggagcagggggccgcacaggagcccgtggcggggggacactggggaggggaggctcaggcatggcggactgcaggttccgagccctgccccgcagggaggcagctaaagcccagtgagaaatcgagcgcagtgccggtgggccggcactgatgggggaccctgcgcactctctgcatctgctggccctggtgctaagcccatcactgccggggcccacagggccggccggccgctgcaagtgcagggcccaccaagcccacgctcaccaggaactctaggtggcctgcaagcgccgcacgcagccccggttcccgcccgtgcctctccctccacaccccccgcaggctgagggaaccggctctggccttggccatcccaggaaggggctcccacagtgcagtggcaggctgaagggctcctcaagcgtggctgaatgggcgccgaggccgaggaggcaccgagagcgagggagggctgctagcacgctgtcaccttttagttgccttacagtaactgtaaaaattctgatatttaaaaaatccaagtcattgataaagtaagaacaagtgagaagtctgataatatatcatttctttccatctccttggacacaatttctcagaagctaagcttagaattttaggaagacacattcaatatactacttaataaaaaagttcattatgtttcatcatttggaataacctcaaattcccagcaaaattgaacactgtgaaaaaagataattaaacaggaaaagtcagagttttagacacttgtttaatttactcagctactgtatttgtggcttcagatttctcagagtaagatttattacagaaagttagtattagtaaacatttaatgatttccaatggaaaccaaacatttatatattgaaataaatattcatctatgcatgtaagtatattttggctaaaaaccaccagaaaaaaaatgctttgacctagaagtttaaggagggatgttgatttattcaacaactatttattaagcaccttctgtgtgtcacaccctgattattacgtcttttgttagactctactcaaaattggttatttaaacaataattcagatattccatatggtttatcagtttccacaagacttatattttcactattttacttttagaggaaggaaaaaaattagtcaaacatttcccatatctatacatttaatgagaacatgggcaagtcttcttttaacaaactttttctcccaaatgattcttaagtattctaatgttctaatggtccataataatttacttaatttgctaataaagtttctctagtaaagttagaaaataattagtgcttactaacgagtattattgattcaaaactttagtgaaaacaaaatatggttattataagataaattataatttatcatataaattataaattctatggttattataagaaaattttttttatgtgttactatgtttaaatacccataagatagtcttgtgtgtatatgtgtttgtgtgggtcagcagaaatagcagactgtgacatcgactgatacagttaggatcaatcatgtaagtaataacatttagttatgaagaataggctatgctatgtttaaagatgcatctaatgatctttgtatattttactttatgtttcccagactttataaaggaaggtgcatagcttgtagacagcagtccccaagtgtagtttttactctgccactaacgagcattgtgatcttgagcaaaccagttggtctcttcaaggttccattttgttgtttgataaatgaaggacgtggaatagaagaacgttgaagttccttccctccttcaaatgtaatgatcatgtaaggtagattgctttaattacatgatactttgaaaaattaaattaaacaaatattaaaaaatcattaaattaaccaacacttcagtaccaaccctgcaatctctaaataatagagtgacttaaataaataataaattactgatgacttgaattaaaaataaactaatcttagattaagctacactaaaggtttggaatttagggtaataatatgacttcctgagccctgaaatattttaccagatttcatggatgaaaacagagttaaggtttagatctaatactcataagctcttccagacaaattgcatgatcacgagaaaagatttacaccatctctatggagtcttagagcatttctctctttctctcagatcctcttatccctaaaggatctctttatcttaccactccagaccaccattttctattttccttaaacttaacagtaatcaaactcggcattttgaaagttaatacattttatctgacatgttcaggttttctggatcctccttatctcccaatcagactaatctgttggcaaacatgaataataatgtctttgacttctttgttccttcctacaactggtttccatttcattggtacctaatgctgtctggtgacacacagcagcattagaacattgaataattgctggttaaaagagagagagggggagaggcagagaagaatgagagagagagagagagagagagagagagcgagccgaaaatgcgggcatgtctctccttctattaagttgttcattagcttttacagtgtattttgcattcatcttgtttattttctcacattctactttagtactttatcttttgatacctggattggttagtagtttcctaaatagtttgtctgtctctatcatttcctgctaatccttcctaaatgaatgcatgcttgaaaagacctaaatctaatttgctactgatttcacaatcttactgcaccactcacttcaaaatggtctcttcttccttggaacgagttttccttttatatcttattcagaaattagccaaatatgatatgataactctagcactttctcacattttatatttctaatcttgaacttttttttgcctatctctgtaaccagactgtaaatttagtatgttacttttatgtagtatatatcctttaaatatttgttgatttaatatgttaacttgagtataaaacgaacatttgaccttgtgtagagtgtaaaagaaatcttttgacacactgtgataggaaaacaaattcaaaagtttattatcaaagataactgtgatttatctgaagcaatctttagtcagggtaagcaagatgatgttaggctttgtgaattaatgttatgagaaagaaagtctatttttgtggagagagaaaattttcccgcataactgtaattagggacaaatcagagattaatgatgcattatattctagagctttaactgataagcaccaagaaatggctttctcaactttaaatggtttgtaaaatattatctctgtactttgctctctatatagaaaataatggatactaggtcttctattcagaaaattcaatatttattctaaaatgtaaactgttgagttacaggaagatttcatatactcaaaaagagcataaaatctacctctactaattagtttctctatgaaagccttccaggcaattacagagcagtaccattggtcaatgctttggttgcttttcattaaaggtatagtgttgctaccagatgaattgcttcatataaaagcacttaccacaaagacctataatggaggttaagtgctatactaattactaatttcaatccttattacctatattttgcagtacaggcactttaaaggaaccatatatagtctgctggttcccgcttctctgagtataagacttggtggtaaaagctctaatttagctgttcttctaataaaaataaccccaaaaattaataaaaagagccataccacaaactgacataaaatacatatactagactttgctactgaactcgtatttacaatcaccgtgtcacaaaaactttaatcaaggtgacacactcttcaaaatttgtattcagccattatggcaccgttgcagatgaagttccaagagaaaaaggtatttgaaattttcatggcttatttcctacctcagcatcacactgaaatgaacacagagcagatgattaataaaacatctgatgacaatggtgactcccctgagttctttatatattgatcattaactttttatatgtatatattgaaattcttcatatgtgctttattttcttgagggccgactctgtgttttaccttgcgtatatccttcagaataattgcaactttgcccactcttggtttatttatattttctaaaatacatcttggtaaaagggcatttaaaatctctgattaaatgttgaaagttgtatctgaaataactatatgtaaagatttgcttcttattacgatactgctcatttctatttttaaacatcttttacattgtgtttcttattctgaacaattatttaattggcaaataaggtactatatgtgttaaacaaatattaatctagaaaaatatgtacaaatatttttttcaaataattaataagtactgcctcaatctcagctaccagattcaaattggacattagtctgctacaagaacacaggaaccatatcttttttgaactatattcagtacatggcatctggtatgtgcacagtcaaataaaatatagtaaaattggggcatatagacatttttgaaaacataaaatatttactaaaatgcaatgatgtttggctaatatatcctatatttattttctatcatctatgcttgggtaaagcatcctgtatttctcttttacagatacattatgcatattaataaagtccaagtatagatattttaacttagcttaacccagaatttcccaaactaatgggactttccctttctcaccataagtagtaataagctctaggtaaagataccagtttggaaattgctgattaagtgttaaaagttactaaataaagacattttcaagaattaactatgaacacaaaaccatgcctcaagaggcaaatgccacactgcaatagtaacaggatttatcattttgcacgttcaggtccactgttcacagctgacaacatcccatgagcaaagcctagaccttaccctactatatattttcatggcatccagtgtgatgactttctctcagcaaataggcagtgattaatccatattttaggaaaattaccaatacacctttctgttattttattaaggttttagctattacttttaaaagcacattttttaggctgggcatggtggctcatgcctgtaatcccagcactttgggaggccgaggcaggaagatcacttaaggtcaggtgttcaagaccagcctgagcaacatagcgagacccccatctctacaaaaaaattttaaaaattagccaggcatggtggtgtgcacctgtagtcctagctactagagaggccaaggaaggaggatcctgtgagcccaggagtttgaggttacagtgagctatgactgccactacatccagtctgggcaaaagagtgagaccttgcttcaaaaaaaaaaaaaaagttaaattgataaagaataaaaattgaaattgcacatttatactaggatttcagataatgcaataatctgggattagcaggggctatgtaacattgcatgcatattaagttacttggctttcaaatcttccattacttcaccttattgtatatggttcacataattgtagtgtaaaattgtggtaattcccaagacatcgattcagcaaatatttactgaatgcctactatttgccagtattataacaggcactggacatattaatttccttgcttcctaactttgtcatagagcagtttttttattacatttaattcagcaaatattggcagagtactaggcttgtggaataggtttgaactagggcttgaagatttagaattctataaaccagaaaaggtccagaagggtattatagacatttcattccacaattgtgagtcagtacttgggatatttgatatcaattgaatacattggttatgtcattaaattacttctttcaagaaccaaataagtgtgatagaagaatttaaatataaattttgattattatttttattgggtaaaatagaaatgtatttttatactttttctttatactgtgttataaattgtgtgctttgcaaaaaacatagttatatctaaaaggggaagagagaaatgagactgatgcttttagtaatagagacgataatgattgcagtaaaatatctttatacttttaatttatatattacttaaaaagcatatttgttttaaaattgaggatatatacaaccacaagtaacattgtttaaaatttctaatctaccacctttgtttcaataacataatattgataaaactcattcacaataaacaagataatttttattttatcaataacggcttgacatttattttatagacttaaaatgagtagtgctagtgtcaaagaatcctcatgaaactctatggttatatgaaagtgaaaacaaacttcttttatgtacatgttcttataactgctgatttatgctactattgttttctcactagttctctacttatctcacgggatccctacactttaatgtgtttcagctgtgcactaccatctgaggaagcgttaggtcttattttctctcagaaaaaaaaagtgttataatattctttcccttagttttaaattttaacttttttacttttgacaaagcctttcctttgtttaaatgcaaggatccagtaaaaagagctttgatatgttgtgctttttatgtgtgcatttttctgatttcattgatgtcctgaattttgaaaacgataatgtacaccttcacgttctcctataaaatggcatttgtacactgtagcaagaacagtttaggacagcattacattcacatgactctaaagtccaataaatagttgatggtttctcagaaaaccacaatttggtgaaacggatgcaaaacagtgctttttcttccagtttgtttttcataaaatcttcccccgatacatattcacttgcttacctgcagggtagcgctcgatcactggccagctgtccacctgcaacgtggcattgccaccactcctcgtgaaacgaactacatggtatttcccatcattaatgattgcattggattcttcaatggcgatgtcatctgtcccaacattaaacttaactccaatttttccctggtgctgtaagagaggaggggaaaaaagagttgaattaagttgactagtcaccatttaataaagattacatacaaggtattgttttaaaatgtgctttggacaacagctgctttcctccaattttacttctgaaaaactacatgtagtagaagcaagattcttgacatctgggtaaatttaagacatctctttcatggataattgatattccaaaaggcacactttcaagggaattgagccgccttcttcccagaggttgtcacagagaaggcgcacagctgcctgcacaaaggacatccttttgtgtactttaacacaacccctttaatccactctccccatttcacaagaaaaacggggctccaaattcttacttttaataactggtgaaatcagagcaatgatgtctgtttagagcccattgacaaatactcacaataggggaaatcattctaaagggtatggggcatttaatgagtgcagtcccttagtcagtattcacaaaaccatcaaatactaacagcttgaaagttattcaatgtttttattttattgatgatgaaacatcaacattttattgatgataacacaggaaggtacaagacttgttcaaggacacataatagagacgtacgaaaactaaaattcatttcccttattcttagattatatctaagctaagttgaagcaaagataccgttatccaaaatgaacgccctcttcacttcttcatatgcaaagcctcattatgaatcattctaactataaagttgttgctgttaactttagaatttcataatataaggtggcaaagagaaacatgtgctatgtcctctgcctctgagaagcattctttaacaggactgtcaactctaccatgaaatcagttgatttctaaagcatgtggatttgtccttaatcagttgcacagaatacctgtgctgtaggcccttgtcagaacacataacctcaaactgtctgtggttcacccttcttcaaacctcagttgagagaaatcacacggaggaagaagggtttaaagtacacacagtccatcctttcctgtagaagttttaaatcagaatgttagaaacctgaagatttgggccacattctcttgactctttgtggggttctcatcattatttgaactaggcagcaggagtatggaatcagcttacactaagaatccttacggaaaatctttttcaaaattgtattaatcaaaggaaaatatttgaggatgttattttgcagtattgctcattatctccttcatgtagagatcctaaaggtttctgttggttttcttccccctgggttcttattgtacataaagatctctttcttataagttagcatgcttacaattttttttggtttgattagctttaggcttgacggatggtttaacttttttaaaaaatcacattttaacactatatacatgtttgttaaataaagataacttattatgtctcttaaatgagattctttaaaatttttctgtagagttatatcacatgtgttaaaaatgtatgtactaaattaattactgaaaatgagcaaaaagtaattctgttaaaataagaaaataatgcatgcttacaaaaaggtctgagctaaaaaaaaatctttaaaaaaatctccataagtctttgaataacgtttgaattttcattggacttttgctgtttgtttattagctgagtcagtctacacaatactaaaatgccttacaatgacatgtatttaaaagtaagggtcatgagaaatatggtggaaaataataagtccaggggaaaatatatactaaagtctctgcagctattaaaattacccagccagaagtgatggcacacatgtataatcccagcagtttgggaggccaaggtgaagaggattgttcaagcccaggagttggagaccagcctgggaaacatagcaagatctcgtctttactattaaaaaaaaagaaaaagaaaaaaaaaagaaaatctgggcatggtggcacacacctgtattcccaactactcaggaggctgaggtgggaagatcacttgagccccggaggctgaggctgcagtgagccatgactgtgcactgaactcctgcctggttgacagcgtaagaccctgtctcaaaataaataaatattttaaaaattaccctatctacatggaccctgagtttcctaacaaccaaacacatacgtagggctctatacattttataaatactaactctggtattcttcataacagttccatgagggagatgctattttatcttcattttacagatgagaaaattaaggcacagggtgattaagcaatttggctaaggtcgcacagctggaaagagaaaagctatggttcagatccacacagttaggctccagagtctggtccttaatcattacaccaggctgagtttaggactgttgtgccatcctatagctgtagctagcagatttggtaaatctagctgtttttactacctgttttatctctcctgctagaatagcatcactaaggggccttgtattgttctttgaagttagtagacatgtatcaatcaatgtatgtttaaaataattttggaataaattgtaagcaactgatatgtggatataatagaatattaaaatgattctttttgtttcagtttcagctgagatgttaacatgataacataataagtcaaaaacacattactgtttccatcttacaaaatgaagcataaagttacttaagccagtcttgcaaaggagaacactgagaactgcttttagggtcctgaattaattacctacttctagtccatcaaaatgcagaaaaaggcaagaggagactgacaattagaagaggatttttggagacagttgagatgtgatgtgatttccacatactgcagggtggaagtctgcttttccctatctcaagtgcaggagaaagggacattagtggaacatctaagaaaatttgatatgtgtcttctgggacttggtgggtggcagcggtcaaggtagtgagcaaactagtatttgactataactgagaaatcttcaagggaagagactgtggcttgctgatgcccagtggccaagcaaagagatattgatgtaccaggagccacttgtgcattagggtttgttaggacaaaggacacttgtggaccctaggttagagtctgtgtagaattgtattgtatcctgtttagcagggttactaaagggattgggctgagtggtgaagaaaactgagaaaagaaaagaaaaaaaaaaaaagaacttggaattgcagtgatagatgaccagatggtgaggtgggaatcctaaatgaccatctgaaggaagtgcatttactacctcaatggaattgcaggtaaattctaataatggggttaaggtctgtaaagaaccaaatgcttccgaaaagtgcctccttaagaactttaagtataggctaagctcaactagatggctacaataatactagccaagtaaggtcatttctgccctttatgtcttctttcttctgcttcatccctggaggaataagagagggagaggaatagtgaaagccatggaaacaatcgtgctcctcccagtgcaagtgggggctccactgtggctgaagcagggataatgaagaggctttaactgacttctgctattacagaggagtaagctgattttactttttatgtctaaaagtgaacggatgacctttttactatccaagagggagcaaagcactgttgagactccctgtggacttccctggtggttagaaagaaatatttttacagaacaagtttaattcctgttacaccttgggaagtactttcaacacaacaagtacaggaagatatctgttactctagggttgcccattgttttagggtctcgtctattatagacctggttcttatccaggatacactggaaaaaattcttgcagtttcctacttattatgaaacttattatggaagtaggccataagagcctattttcatcagagtattaattattaagaaggtctagattcagtgaatagaagcattgcaatgttaaaggtgaaaaatgcactaaactctgaaataagtccctttaacttaaccttaaaactttctgcaatatgaaatgcaaaatgctcattttctaggtgcagaaatctccagatttcataggatttggtttttttgcaacacaataaaataaacaatttagaaacaatgagcatccgtgatgcttggagaacatccgactttttttttttttaattttatatatatatttttttattatactttaatttctagggtacatgtgcacaacgtgcaggtttgttacatatgtatacatgtgccatgttggtgtgctgcacccattaactcgtcattgacattaggtgtatctcctaacgctatccctcccccctccccccaccccacaacaggccccggtgtgtgatgttccccttcctgtgtccaagtgttctcatatcatttgacttttaaatgacgcccatctcttcttggagatgttcagttgttgcctcaacttcaaatgtctttgacatctcatggatttaaactctagagttagctagaatggaactgaaggctatcaaaataagggttcaaacaacaggcccgaccctaattcagacattatctacttcaccccaagttgcatcaggctttgaaaaacagtttaattataaatgatcgccaaagagttttccctgaaaacaataaatttaaaatacacataaagcacaaaatactaataacaagcatatttataagaccggtatttactatttaattcagaaactatagatattcttacaacacaaccatctcatgtttataggatagcaagtcatttaaattatataagcaataaaacgtgctaaactttcttgccaatgcgtaattacaatttaaaagaattcatttcaaactcttattctctgggattaaatatgattgtcttggcaaattctcatgaatattgcattagcaaaaccagaagtcatttcactggacatgtctttatctccctgtacatgtcttgatctccctgtactgtatattccttgaaatagataactggctcaaatcataatttcaaaaatctcttataagaatatcagtaacgaggcatttataatttaatgaagactttccatggattcattaaataaacagtgacaatggtaattattgatttttttacaaaagctcatttctgaataaagattatattattaaaccaagttaaagggaaacatcatgaaatatgacactgggaaggtccctgaaatttctagcaagtggcaccatagtttaatgcactgtctaattccatatgaaataacatatgcacttgtaagttttatgttttaactaagattaagatttaatggtgtaatcaatatcttgggtatacttcaagcaagatgtctgcatgttacagatgcatatataatatgtgcctatgaaatggataaagcagaatacacgtaagtaaagatttcggtctacatgtggcatacagacatgttacataagattttagtgcactgtttcccctcaccccattcttggattgttatatagaaatgtttggctcaactatgctcaggaacagagaccagtaacaaataaaaatgtctctctctgtgtctgtttactatactcctagagagaaggaccaaacattgtgagcaagtgtgcaactcaggagggcatgtagattagcagggagccctgtttacgttctgtaaacttctgtcatgcaccatagtacagtccagtactccagggccccactttggacagaactcaacaatgtctttaaatgctctctctatgcttgtactcatttcagaatacagaaagactcccatagtccaaatctacattgttgattgaaaccagagttgggtgaatggaatgttttgcttctccagagactaatcctcaccagggagcaaaggttttaaggcatgaaggggagtctggagcctatagtcacagttgttggactatgcaacactgcagacagtatcagagagccatctgttatctcacctaaaaacaaacacactcagataattgctaatttagcccaaacacttttttttttttttgagatggagtttcactcttattgcccaggctggagtgcaatggcacgatctcagctctctgcaacctttgcttcctttgttcaagtgattctcctgcctcagcctccgaagtagctgggattacaggtgcatgccaccacgcccagctaataatgtatttttggtagaggcagggtttttccatgttggtcaggctggtctcgaaatcctgacctcaggtgatctgcccaccttggcctctcagactgctgggattacacgtgtgagccactgcccccagccacccaaatacatttctaagtgaattacttagaggccctcttggctggtagagactctgtttaccaatttagatggcctataatggtaagaagtggttttaatctagttgttttaacctggcactgagatatacatgccatcctctaacccccaaaaagcaacaccaccacatcaaaaacaagaagttcctgctgccctgtctcctattttctccattaaatagcgtctgtttaaaattcattcaggtaactaataaaaagtatgtaatatgcacccagcattttcctactactgggaggagaataaaaacaggtaaagtctgttttctgctcctgggaaaactttcaatcaaattgggaaggtaaatcgtgcatgcaaatactcatacccacaaaagagttgagggagtggtggggaaaagcacaggtgcattgggggaagcatctgaaggatctctggaagcctcaaactgccatgggagcaaaccagcatttggacagctctaacactaccagcaggttctaatgcaactcccagggacatagaagttatgttctgtctaccttctatctctcctttcaggccccacataccagactactcactatgtgccaggtattgagctctatacaatgtatctcatctaaaactcccagcagacctgaaaggtaagtgccattgtctctatctccttggaaactttaatcttgctgaaatcacacagccaataattatgggtactgaaatatgaccaatttggtggggcattctaaaactgaataatgtcagttgtgtcagtgttccaggaaaatgtcttgaaactaaggcacccttagaggatgagtcaagaggagggttactacagggtgcatggttttgtttttggttttagttttttttttttttttttttttttttttttttttttttttttttttttttttggctagttacattttgtagcactacacaataaggaatcagaagtgggcaagatatgtgggcaataccacctcagaaacatctcatttaggagtaatacatttttaaaaaacagccttttcatttccccatcaaatcttcattaaggatagtgtatcttttctaatatgtctccatcctacaggatgctgtagctccttcaatgagactatattctggcagcgatattaacttcctggaggcttaaattcatctcttggtcctaagaatgtctaataaaattttctaagcctgtgccagtcctcctccacacactgccttaggtgttagtttttatatgcccatttcaacccctcaaacctattaaaaacaactttagggtaggaaaaaagcctggtgtattcctcattgtatccttcaccacacttcccagaatacctttctttacttttgcaaatttccaatattctttcacatcaattttcttttttttaattgagatataattcacatatcataacatttgcccttttaaagtatatggttcagtggttttagtatattcacaaggttgtgcaaccatcaccattatttaatttcagaacatttgcatcatgctccaattttcttttgatgagataatgcatacaaaattcttagcacatttaatggctacatagttcctgttagctattagcattattattattattgctacaattattgttgttattcatcactttgaaaaacaatgtttagcttcaccgtagtttgatggaagttaattaaaatattgcttcaattatatagacatttcggttttgctagaggatacatttttaatgattacaacttgtgaagcagggtatctattttgtaaatgggaaagctaaagctcagaaaggctgagacttggccaaagtcagagcatctatctatgacttggatcaagagaggatattctaaaatctacctgtgctcaactgtaagataagtggttctcccgttgattatgctgaggcagagcatgcttgattagacaacatccatgtcccctcccatctcaatattatggttctagggaaatcctaaatgtaaggcaaagcagttctcacggaaaaaatttagatattactagttgagttttttgaaacacattgaaggtgcctaagtttgaatttgagtctctcttagatttccttcaaaatttaaaaaaatagaaaaactctaagattttattgtgtttttaaatcagagattctccaatttaggaggagaaagaggactttgcattaggttgaagtatcagtaatctgtgaagccttttgtgaaccatgtatgtttcttcccaagaaagtataatctctgatggaagcgcttgccattattgggaagagcccctgccttgtcaggtatgtaggatttagtggtcgtaaagtgagaaaaaggatggacagatcttgagctccagtgataacatcaaaacacttcagtgcttctatttcctcattgtctctccttagatgaaattaaataaaaaatcaaaacaatgtcaagatgaatttagtccactaagtgactggctgctggatctttgaatggggtaataatcttgatatcggtattttaagatattctcaattttgtttcactaataaagccaatactggattattctttacacagtatttgagaagacattctcaaaccattatgaagttctccagtgtggccatgggtacagacatatcatcaagccttttcgtgatacttcccccttccaaatagcatacgtttgcagatatcacgatagctgtagaataaaataaagctaccttagcctcttgtgaatcagagtcatctcattgagataattaattctgtatctccatccactgagacaacaactactatgaagttgaaatagttgcctttaaatgtgtccttatgtgtaaagaatgtcttttattatttttctccctgaataatcaatgagcagaaatcaaatagaacaagaaagaggcattgacttggtggcctatggaaccttcttaatttttcacaggtaatactttccatttggatagttagcctagtggtctggcatcataacaaatactttaggttgctgtatgaaaatctcagcgtcacactgaattaagttaagccttttccaaagtgtaatgagctgatcagatgtgtattacttgtttttgttcatttttttatatttaaaaattattgttgctttaaagacccttgttggaatgttaaattactttttcttgtacagtcacattgtacagtaattcaggaaactatgggcaatacattgtgtttcaggtgctgattaaaaccacaatctttgtttattctgcatctgcctgaatccttgtctttggaccattgcactctttgatattacctccaccaggaactgaacaggaaaggggcattctatcaattctgctaattgttgacattttttatgtaaaaaggttttcctataaaagagctttgggattatttgtggatttcatttacttgttatatcccaggatcatcattttccaggagacctgactatataattacaatctaactctaatgttccaaatttccatagcacaaagcccaacatttttcagacaaatagacagaacatccttggattgtaattttagtcctctgcatggcaaatgtaaccttagtaactcggttataggtaaaacaaaatgaaccttcgtattttagaaaatccttaaaagacgtgaaaacatatcaagagattaatgtaattattttcagtgcttccattgatataagccataagctacatacagtaaactgggaatggaaagatcagtttggaaggagcactatttttttaaattctatttgtgaatcatgacttgcaacctaaaaacaagagtgaggaaatgttttcaagtgtgtttgatggactgacttcctaatgatgctatgttagttttcacaagcctcaagaagagccctaccttgaaatgcatcccaagagaaaagctgacagtgctaacttttttcttttcgttttctctttcttattgacttctagtccaggactagctgtccgacatccttaggaaaaaaatgtgtgtatatgggcatagaaatgcatttaccaatgaatattttctaaagaatcagcaaaactctgttatccctgaagtggtaagtaataattcctacagccatcaaaaataaatctatgttcatgtgtgtgattgtggcacaacagaggagaatatggaatctctaaggcagaaattcctaatgattataacttttttcatcttcacaaaacagtaatacctccacaaaaatgaagtaatgcagaaaaatatttatcaagtgccttttagctgcagtgaattttgtaaaacaccataccactcatcccatgactcaaaactgataaaatgtgtgttgctggttatatttatatacatttattttcctcaattgcatggttttctggcataaatgacactaaaattttggaactaccataacacatgaagttcagtattcaccaatatttatgtacttattcaaaaaccacagactttttactatactcctggcactctgttaagttctggataaatatggttaacaaaccagatggtgctgctgtcattatgaagcttaagtctcacattattcgttacacattaaaacttactgtagcatatacagcatgctaagtttcaagaaggcaaagagtaaggatagcatgagaggaactgaataatttaagcaaagtctccttgagaagctgaagatgagaagaaatcaataatgaacatttagcattttccaggcagagaaaacagcatgtgcacatagcccagggagggattgtacaaagacagatccttttatgaacaaatgcagacacagatataaatatgtggactctttatagctattaagatgtgcaaattatatgtgaacatgtacaggtattcaaaatatttgtataagatataaaactaggttatggaataatgcgtaacaaaagtaaaatatattatttgcacaaatagagcaattgaaaaatagatggtgaagcacatttaaaaaattttccaatcagagaacagaaaattgttgaatatatgtagaacctaacagtatgcaacctgacattcatctaattgtttattcctaagtgtcattcatcaatgtgcattatgaaatgcaatttataaaagacttcctgaatcaacagggactcacatctttttcaaaagtcacttacttctacaatgtcaaaaaagattcatcattctacgctcatatttctaaactaatgtaacatgtttagtttctttgtgtggtggaatgtcttgttaacttatttatccagagagcccttttatctcaagatgtagtaaagagttatccataaaatttctgccttaagatttatgtctgaaatcacttgactggtttttcaagtaccctccttaaattggtagaagaatgcaaagttttcacccttgaccctttcaccttcctgttcactcagaagagcagatgaacagggtttaatgcctgtgtcccaaaatgcagtcttccaggcagtcaaccaatcacttcaaatgagacgaaggattctctatccaattctacttccagaaaaattttaaataaatgaagttaaatgagcatttgccctgaaatttggccaggaatcgtgaagccaaaaacacgcgaagtgctcaaattcaagtaactcatggacgttttgaacttgagataaaagttcacttgtaacttctccagagcagtaaccactggaggctctttgaggtcatcccttcccattgtttgcctggaaaagcaagagaatattttgaagacagttgtggacgtttagctcagtaaagacagccgaaggaataaatacctggagcaatgtcaacttagcagccattgaccaaacaaacaaacaaacaaacacactttctctcttactgctccatcacactagcttttcatttccataaatgtctcatgttctgacccatctcaggcccattgctcttccttctgcctggttagctgtttccttgccttccccatcccaaaataattgataccctatattgtttggagataattttgagaacttaaggatagatttgggcattgaatctgctgaataagggatagtgtttgtgaaatatcatttcgtgaagcaaaaactcattagtggtcatctactggagtacaaaagacatctacttaaaagtctgggctgacaatagttgaaaagcaagagacatactgggaggccatttctcttctgattagcagaattatttggtggactctgactatttctgataaatctttaagtactaaatatcatagcaagaaatatactgttgtgatcttgcattccatttatacacttcccctgccaaacatgtccactgttttaaaataaacatgaacaaaacctaatagagaaggtaaaaatgcactgagagattaatcagaaacatcattctaaggccaagtggaaaccatatgtaacttattcagtgtttggtaataccagtgtcagagctctgaaatgagtgtggatattccagaagggcaggatttggcagcagatgcgtgatgatgataatgatgatgatagccatccttcttgccatgtgtcagacactccttctaagcactttacaggcaataatacgtatgaatatatatgattattttcatttaaatgatgaggaagctgagcctcaaaagcttgtcctaaatcacatggctaataagtatcagagctgtgatttttcaagcagtccaattccagattttgtgtgctaaactataccattgctcctctgaggaagtccaacatgcttacaagaggttgcagcttgtttagctgtggtattaataaggctctttgaaaaagagagacactaacatcctcattattgtatatatcaagtaaaacatcaagtacttttcagacctccactcctttaattctcacaataactcattttgccagcctaccaatctccatgttgaggatgtttaaaactcaaagcaaggaggtacttttctgaagtcacgcagctaaaacatcaatctagttacattcaatccaggtctatctggttccaaactaagagctttcaaccacatcatgctactccttctgcagagtcttcatgatcccctagaagtagtaggggccagatgagagtatcctagagctctagacgcttaccattttaggaggtttgtatactgataagttttccaagatgggggtggacagacgcagcaattcctctttcatgagcattaaattagtccagttgtttagaactgctagtaagtgaaatattaatctccattagggccagagcagactttgtcatacttcaagagccagaaatggaagtactatcttttaggtttaattgagattctggagtgtcagcctattttcagagtctgtaagagaggaacactcagagaaatagccagtgtctttcctctacccaaccccttcccacctagtttacatccagtttttctctagtatgttttttgtttatagccaacagatttatttaaatcatatttatcattgcttgctattttgaaagatgtgcctcaagcttccaatcaaatccaaaagaatacataatcatcaaaacaaggttagtcatggagttttctactaaataacatttgtgactgaaataggcaaggaaatgagagatttagttgtagtttcccaaaggtaataaacctaatatttaaaaagaaatagtaataacttaccagcagctcaggtgttccatgtgtcatgatcaataaccaagtaaatatagatctgaattttgtagccactttggttgtatcaaaaaagccactgcatggtactattacatacatagtttatatggtttagaagaaccatataaaccaccattaactattccttttatcataataataaaaataataggtggagttgctgatatataaaatatgaattgatccattagaagtaattttctattataatttttcaactttcttagtcaatttcagattatgattagaaatgttaatgttaatcttgtttctctaccatttaacccctctcttaaaaacataatgaccacttcttagacccttttctactctccttccatgtatatttcaagttttctacttataatttgtaattatttaaattgttttatttttatcttagttgtttgaaatcaacctctacattattaccatcttttctttctccccaagcttataagcattggtctagcatttaatgataacttttaatttgggatgattatatccaagatgctgccccagaatgagagttttatgaatgcttaatgcaaggaatcataaagcttataccagtgctgccctgaaaaattaaccaaagaaaaccccaaaactctttctccttaatcaaagaatatgctttgatgtgaacaaaagagagaagaatatttaatatcagctttggttgcactgcaattagcaattaacaagtaataacctatgattagttcacaaactccaacaaatacacttaatgacaggtgactaagagatgtgggaaacatttaagttagggccaagatgaacaaatgtgaacctagcacaatttggtttggtaacattaagcttttgataaactttcctagtcaaaattaaattattccatattactttgaagtaattataatacaattttctactttaatcagctgtctcaaactttgtgatcacaagttattttatgcaaaaaaaaccctaaaagaaattatgaaagatttttcaagaaagatttataaacttaatctttcaaagtatctcataaatgtaaatgcatgcttagcatttttaatggattatttactcatcatttagcttaaacatcataatgtttccaatctatgttacaagagctaagccatttcaatgctttttgaacaagttactctgttgacattggcacagaccaccaaaatgcactgattatggaagatatacggttaatgcatacagtatctgagcattgatagagcatcaaggcaaaagcaggcaatacttaagttctccaaataaatacacaaaaaagagagcttgatgaccacctaaaataacttttcaacatggaaaggtgagccttgcggcattccacatacagattagctgagcctttcaaaggtattgttgaatttatctatttctgagcatatcttacttttaacccaacttaattctttggaaggacatgcattacttctgatacattaaaaaaaaaaaaaaaaagacccttttcatgctcttgcttgctaaaactctactagaactttcaatgacaccatattgcctctcagactattcaactggaaattgtatcaggtaaactctcattcattattgcactacccatcttttaaatttttaaagagattattaggggctgtttaaaattattactattcttccacttcttactttttttaggtttactctcccatcacaattattgtcacatgctacattccagactacatatatatatatatatatattttttttttttacccaagtactacaatagaaatgtgatacatcaatggattgtaagaaaaaaaaactacccagctatgtacctggttatattcacacattgttacagagctgaaacggattaattaggcagttaataaaactattacaacaataattgcagaaattactaacgtaaaagtatcttggcctagatagtttatgtctcagttaataataatgttgatagtaatactaataagttctaattatcaatgaccatttgctatgttcccaatttagtcttttaaatatacctctgaacagtatttggctcataatggtcacaaaacaagtgtttgctaaatattgactaaattcttatattaactctgtgtgagacagatgccattattaccttcacttaataggtaaggaaactgagtcataaaaatgtcacttgctcacagtcactccactaacatttgaaggatcaggatttgaatccagatctgtctatctccaaagtaggtgttcttaaccactactgttttatgttgcctttggaaaaatatccaagaactagataattaccagtgatgaaatctgtttcagaatatagaaaagtataactcccctctaactccataaaattaaaacaaaattacaatccctcctaaatgtataaaattagaacttccttatacaaaagccaattaaatgtagcacacacacacaaatccattgaccaatgtatattttaatcataactcactataataaagatggctgctgcatatattgccatttaccatgagtcagtccttttgtggtgcttatataataaccgattttagctttacaactctgaggtaaccattattaagatcattttacagagaaaaagaagtggcacaaatttgcacagtcactgtgttaacctaaggactcaaacttggtccttttttacttcaaatgctacataaagccagataaagtgtatgtcaaaaactctgagatatttcaaaattgagaaatctattaacatgcatcattaggacaaatgagaaaaaagcaaaatactaagataaattctataaaggtatttgttaagttcactatgcatttttgagatatttttaaaaatcacttggtaaactagaacaatccgttgcatgataaaactatttctacctcaaaccaactgccaacatcatgcttaacactaaaagcgttcccaatgaagtaaaacagttttacattgtcaccaataggtcttagcgttggtttaaacatgtcaatcaatgcaatatgacaggaaataaaaataacagtttaaattattgatagagaagaaaacaaaaacacactacttgctgtaaaccgaaaccacactgttggatgcaaatatagccatttaaaataaaatgagagagctagccttcagaaaaccattctaaaaataagataaacataaatgcatacattctcataaggagtggcaaagatattgagcaaaatgttttggaataaagaattaaaatgtgagtttaatgaaactatataattttttggcaagtgtttctaaatatagactctgtgtgatggatacattaaaaattattatgttattttctttgtgttagaaaatgtccataatggaaagaatgaacaatggcagtctgcgaaacaagagtactgcaatttttgtctctaactatatttgtaatcttgaacaaattacataactcctctctcttgctttactttcctcatttagttcatctttttctagatcatcctttctggttctgtaattctattttattttcagttgccttctcaattttctatattgcaatatattttaattcataatggttcaatttgtgataatcactgctcagccacaaattgaaaatttagccaaaaaaaccccacagaaatggcattgctttgactttaaaatagcatactcttcctgtcttttttgagatctaaaattgtttatcagtttgcggggttctcttgggtttattgtactattagacactgacacgttttaaaggatccttaaaaaaaaaaagaaacaaatgaaaagaaaaagaaaacaaccaaatctggcttgttctgggatgctgagatgtcttgacagcaattactgcagtagagactggtgaataccctattttcacagctgatgttttccttcaaaattgcagctaccttcactttggttgaggccagggtactatatttagatagtataaatgtatccagagagcaatctttcacgtttatttgtagagtgggtttatttttatttattgatgtcacacaaaatgatgtttcctcggtttctgctgtatataacataccaaaaaataaagacggtctagaacacaaagtaagaatatattctgtgtgattatattgacaatggtttcgatttttatgcaattatactcccataatgttgaaattgttaacacaagtctatgtttactatgtaagaggaaactttattatgcataatgaagatggcatgggaataagggagtctcttatccttcctgtcaacctaaggccaatgtgtaatgcaagaaacaagtaggacacagggaaaagcaatagccataaccaagagaacatcagctatccctccctcctcacttagaaataaagaatgttggccgggcgcggtggctcaggcctgtaatcccagcactttgggaggctgaggtgggcagatcacgaggtcaggaaatcgagaccatcctgtctaacacggtgaaaccgcgtctctactaaaaatacaaaaaaaaatagccgggtgtcgtggcaggtgcctgtagtcccagctgctcgggaggctgaggcaagagaatggcgtgaagccgggaggcggagcttgcagtgagctgagatcgcgccaccgcactccagcctgggcgacagagtgagactctgtctcaaaaaaaaaaaaaaaaaaaaagaaagaaagaatgttgagaaagcaaagcattagtttatacaaccttcaaaataaaaaataatttcaagtcaaattctttttccaactttatatgtggggtgtgtgtgcgtatgtgcgtgcaaattaataagtcctagacaataaaaaattgatagcacataaatggaggggccaattctagcacttctttttgtcttttttctccattattggataatagtggttaccaaatagaattcaacaacagaactgattaaatattttccccctaggttttaatttagactacacaacatgtatttcagtacttcacattattagttataaaatttttctattgttcccctattgaaagtttaagagaatgcccataaactgagtttccttttagaaaaaaatcaaataatgtcaacatcctttgcatctcatttcttctctttcagacttatgacttaatcctcattagttataatactttattttcatcttttttatttgattatttaaaactttaaggtgcaaatgggttcattttggagacgataaacaggaaattttaagatttctcttggcccgttattttagattgtcccgtgatacactgggggcaactagcgaaagaaatgataatttgccaatgactcttaaaatactgaatagtaaaataacaaaattcttagaattgggaagtgatcttaggcccaaactctcatgtgataacagaagcccttctaaaaatatctctgacaaagggtcacttaagttcaacttgaaacatgccagtgatgttattagttctcaaagcagcctattcattattaaaatccttttgaattgaaagttactctcatgcggcatggtggtcactcccgtaatcccagcacttttggaggttgaggcgggcagatcacttgaggtcaggagtgagaccgcctggccaacacggtgaaaccccttctctactaaaaatacaaaaattagcagggcctggtggtatgcacctgtaattccagctactctggggactgaagcaggagaatagctatagcctgtgaggcagaggttgcagtgagccaagatcgccccactgaattccagcctgggtgacagagtgacactctgtctcaaaaaaaagaaaaaaaaaagttactctcatgggtctgcactatggatcattttagtgtaatctgcaccctcttgccaaatcacagccctttgaatatttaaaaacagttattaggccacattttccccacagtcagcccaggttttctgctggaaaaatcaccttccattctttaactatcaatccttaaagtttttataaccattcacctttcagctatctagtttgttaataagcttagatgctaatggaccttagcacaatacactaacttcaatgcaacgtgtaagatgggtaccaaaccgtaagatataaaatgggtactcaacagtgtaatatgtttcttaattagggcaccacttttccatcaaaattgtctgagtttttttttttcctttaatagctgcactcactagttgatgatctcagcttttagcaaactaaaattctcagacctttgcacattatgtattagctagatatctccctgtacttattcttgtggatttgaaaatgcaattataggactttaaccaccccctccagatctcccatctgtgttgcctttgcttaaacctttttcttcatccaaaatactcctacctctgctgtgcaaaacactttatcttgggcttaaactcccttgggtccttattacccctgctactgtatcactatgcttaatggagaagatgaaatttacataggaggcaaacaatccaggtttctctcttcatctgtcattacaccatcttactgaagctggtcccttcgttgttcagccttctccggtagacagagacaaatccgtgttacacaagtctgcttattccgactttagtcttgatgagtccacatttactggctcagtgcattctcgctctctctcactcaaattatttttggttttgcaggcatcctttgaaatacacttttaaaatattttgagttgtgaacttttagatggagataggattccatgagggtgcaagggctgtttcatggctttggtatgcagtgtaagactcagagtcaaatgtgtctgggggtgtgtcccaggcccatgtggggcaagccactgtttcctttactaaaatgcagcataaaattcatacctgcctcagaggtcaaggaagaattacataagattaaaaaaataaaatgtttaaaataatatctttatcaaattaagtactcaataaatataatctattaatatattaattatactattctagatataaaatgatcatcaaaagaaatcagaaaatgacaaactctttgctttttggaacacaagacatctggtgcctatgccatttctgttgccaacatttggaatgtgcctcccctctcattgctcattatctccaaatatccaaaccctaccttccctttgatgccaagtcaaaatgtgacctcttcttctgaagccctcattacccctagatttgattcctgctcagtgacgatcttgaaggtatggcatttttgcaacacatccttcaatccctatcatctggcataaacctggatcacagtaggtacttaataaatgtctgttatatgaatcaatgactacctttcccgcagccatcattaatttcttcctctcctgattttgtatatccttattgcacataaatatttaccatgcatcataattatttgtgcatgtgtctcttctgccttgcaggactataaagctttttgagcactccatgtcaaattgacctctggctaccttgcaattccttaatacatactagacactgaaaaatacttttgaatgaattaatatctgcttttctctattgctacagtattttttgtccatggaagttctgtaatctgtaccaggaaaataattaaccataactcacctttgtaggaaaaggattaaccataaactgcctttttctgagacatctgttccataatctaatgaccaacgctatttatacagttgatctatctacaaccccttcaactgtaaaaagcatatggaaaatgtatgttcaattctagaggaggaatattttggctatccttttgtgactccctttatctttgatgctcacgtataatccaccttaaaaggctgtgagtgaggcagaaggaggatcacatcacttagatgagatcttgcctgacaccactagatttgggccttcctatgaaactcccaagtttcagttattattatatcgaaatgacttctattgaacactaatcattcaatggtcagttaatttttattgagtatctctatgtacacaggagactatgtgggatgctatagaagatacaaaacaaactaagggtctgttccctgtttggaaggtaagatctatatatacaagtatatacacaccagtgaaaagtaatatacaaactgaaccctaaaattacagatgtaaaaaaatatataccacagactgggagaaactatttgcaaaagatatatctgataaagggctgtgatccagaatagttgtgagatccacacaaagaactcttgaaactcaacaaaaagaaaacaagatagatttaaaaatgggcaaaatatctgaaattaccaaaatgagatatacaaatggcaaatacatacatgaaagatacatagcatcatatatcattaaggaattgcaagttaaaactacagtgatacaccactataaacctagtagaatggccaaaacctgggacactgacaacaccaaaggctggtgagaatgtagagcaacaggaactcattcattgtcagtggaaatgcaaagcaatacagttactttggaagacattgtagtagtttcttactaaatcaaacatactcttactacatgattcagcaactgaactccttggtatttaaccagaagagctgagaatttatgtccacacaataatctgtacatggatgtttatagcagctttattcaaaattgccaaaacttataggcaaccaagatgtccttcagtaggtgaatgaataaataaactgtggtacatccaagcaatggaatatcattcagtgctaaaagaaatgggctatcaagccatgaaaaaacatggggaagtcttaaatgcatattattatactaagctaaagaaactaatctgagaagcctacacactgtatgatttcaactgtgtgacattctggaaaaggataaactatagagacataaaagaacacattggttgccaggatctagtggggagagagggatgaataggtagagtacagaggatttttagggcaatgaatgtactccgtgtgatattataatggttagtactagtcattatacatttgccaaaacccacagaatgaacaccaggagtaaaccctaacgtaaactatggactttgtgtgataatgatgcaccaatgtaggttcatcgattataacaaattaccactctagtgagggatgttgatggtggggagactgtgcatgtgtaggagcagagagtatttggaaaatctttgtaatttcgctcaattttttttttttgtgaacctaaaactactctaaagaataaaacttacaaaaaaacatatatatgttatgtgtatatatatatatatatatatatacacacacacacatatatataataatacatattttatataccaaagaaagctgattaaaactttgtttagaagtacagtaggaccacagaagaaacaaatttctgggggtactcaggagtttacccgagattacgtaataccaacaggaatcaatgtttcttcagcacaaactgattttggaatgatcgaaacaatgtatatgtactttctcatttaatatccacaacaaactaataaaggaaatactattattatctctattttgtaaatggcttgaaacttattatggtgaataacttcctcaaggtcacagaaccagtgaggggtataagtgagatacgaacccagtcctgtccaactgcacagctgaggttcaccaatatcctatacttccagtcttgggaaaagaaaaaaaataaaaattcagttggacaaaagcaacagaaagagaagtccaggtgggagaagtctgattaacttctggaaactttgcaatctatgacagttttatgattcacttatttttatttaatatttcttcaacactactagtctatctccaatgtgaacagaggcaacagtctttctgttacataagaatcatgtacatatgtatgtttatattcaatttataagcagtctgtctttttaagaagacttattaaggagaagtaatttttcataggatcagtcttggggctaagcaattatatttgctatctttttaatactagtagtcatatttcttccctaattgattattgaacctttctaaatatgtctgaagacatagattgaaattatcctaaggctcgacctctttttttaattgtgactaacaaattttaatacaaggcaaacagcaaaacatggcaggctgaaggagtaatttcttgcacctatagccggagtttttttaaagagctacgcaatttttgttgatcttccactggcttatctacagcaattgaagtttatcagaaagatttatgacatggtattgcaggccctaataaatgactttgggaagctgggaaaactcactaaagttaaagttattatctgaacctcatagggctaattagagatacaacctgaagtgttgagtcagcagtaagaaacacaacacgttatcaattaaagcctccatctaggcttggagaagaggtggggaaaagaaaagatttgcaatgaaaatgaatcatatgtttaaacaccagagccaaaaattagtcctcaaaagcatttcctgaactctctggaaatgtcgatggggtcagctctctgcttaaaaagggacccttccaaggcattctcaaagtaagttaccaaagttgctttgcatatgtataacaggaagatctgaacatatacagatgtgggggttccagaaagcaagaaaaaactctacctcttccccacatctcttcttctgaggaataggcaaaatcttccttccccaacacagctctgtgacactgtcaatttaaaacattttcatgcaaatcaagttaacatttaaaaaacaaacaaacaaaacttgcactatgaatgacgtaaccccttctcaaatactggactttaactactgccattgaaaacagggtggtttttcttaagcatttctgacttgatgctgctgttttcctgagatgcgaccaactaaaaatgacttaaaaatccctgcaccttcctggtattaatggaaagaggtagtggggtgttacagggagctaacttttttcatggttttcttaactgagttacaaaaataacagaaaattgcctctgtgcacatgtgtttaatgtgtctatgcatgaaaagccttggggataaagggagaagtagatattttcagaatgtttgattatgattgtttgtatcagaatctgtttagacaagaaaatcagaactgaaagtagacatatgttaaaacattttcagcccatatccttctgctttcatgttgaaaattgagggccataaaataataaacatgtattagatttattgagttcctttaagtcggcaagatccccagagtgttgtgcaaaataacagcaacttttgaattacaaaattattacatgttcccatgaagattatttaacccagagatgaataaggagaatgggtaataaagagacctgagagggattttccacacccttctcctcaatccataatttaaatacagtcataaactgtgagtaagcaatataagcatttgtgtgcagcatatatttgagcctgaaaggtagaaggcagtgtttaaaaatatgtttttaataaagcctataatacagaatagacaaacaccaaggtaaagatggattagaagaacaagtattaaatgaatacaccttctagcaaaaatcatttcttgttatgtgcctcaaaaaagaacaatcttctttagatagtattttaagcaactgactagtgtgtatgtctttacacagccatagaagagtttcaatgagtacttctcaccgattcagtgagccaaatcataaagcctcaggctgtcagaaaaaaaaaaaaacaaccaactgtaaattttgacaagaatgtgacaaaaatatataagatagattcactagcatttctagagtgaaaaattactagaattggcccacggcctctattgctgaaaaatttaatgtaattactttttttatgatattgtctagactctccagcattggcagaatttttgttctatgtctatgctggaaataaattaaataaagacctaggttttcttccttctattgtaagaactatgtcctcttcaagatgaatgtgattatggtttagcaaatgaatgtgaaggtaaaggtgtttaggagaaaatacaaaagtaagatcttaacgttgtacttaacagaatgtgtccgttagtaagaatactaaaaagcaggattgtaaggaagaaattctccaatgtaaaacagcttgcatgtcttctgggaatcttgtaaaaatatagaatctgattcagtagatctggagtgggcctaagagtctgcattcctcacaagctcccaggtgatgctgatgccgccagtctgcaggttaacaccttaagtagcaaggttataatgtatggggaagattcgtggatagggtcagtcttttaaaaatctttaaataatttgaatgtaaattatatgaaatttctctgtctcctggtttcataagtgttttcttttttttttctttagacaaaattggaatagcagtttgactatgacattctaattggtgtgtgtttcagctagaggaagattataacaaaagagtatttctccaaaataaagttttcctttattttgcttttgtaagtagctcaacaaaaaagagagtgtggctctgtgtttgattttacttcctttaaattcaaaagcaggcactaaaaatacctttgaaaactatagtaatgaactactgtggtactaggctcaagaaatctggggcgttcctatggacttagtggcaattgaagcagtcagattttcagatttagctgccatcagctgtggattggacagtgacatagtctaggacagatgtcaattttagccttcttctaacataagtctggaatacattttaattcaccagcaggaaggattttgttgcatgtaagttagagtttaaagccaggtttatttttgtttgggaaaaattctgtgcatctcaaaaggcacaatacctgtgtgttaacctgtctttttttttttttcggttggtattacagaattgctgataaagctttacatttacattggccagtagactagaacagattcctcacgtctctgtaagagctttgtgctgctcacttgatccaagttaaaatctctccacatcttaagttgaaaattaacatacgggaatttaatcctgacatagccactgcatcaacttttgtctagtttacgctttgccagaatgtcttaccattatgtgtctttatcttttggaaggctaggtatattgaaaatcttttaaaaataattttaagaaaagaatgtaaacaatagaaatttattcactttcttatgggacacatttcctgccaaatgctccccacaaagtaaacaccttagggtcttttttatttggaaaatgtaaggagatacgtaagtgtggatatagattcttctaaaatgtcctaaaagaaataaaattgcaagttttcctttgtctttcatcagagctttctttgtcatgtctaaagccccgcggcagggattagggagatgcaaaaccttactgtaaacagggaagggttgaaagaaaaggttcattaaaaaagaaaaaaaaaaaaactatcatttgaatgtaatatgtgaaaaatgtttcttccaggttgagtgaaaaatatactaaaaaagtgtaatcctagcttaagagattttgttttaaaatcctaattctgctaacaaggcaaaaggaacttaagatacggatgtatataaagcctcccggttcacccatcagtctttgaaactgccacacctaaactatctgttttagtgccattctcctatatttactccagtcatttttatatttcagttttgctcttaattttttttcccaacagtattcaagaagaaggataccaaaaaaagcattcccataagtattgtaaaaagtctctctcatgggtttgtttttagaaaaatgttaagccatgtttttggttcagtggaagaaggagcctgtgatagttttaacacgtgtacccaattagttgttctggacttcagcaaatgttctgcttggagcagctgttaacagattcttgctctattgttaatcaaaaagccaataataaaaaggcaaattaaaaggcaatttaatattatacttgtaattattcactttgtttctcatataagtgcaatctcatttcaatgcaatgctttcaaagaaaacatatataaggtagaggaaaatatcaatataaaattaaaattttaaaaaatggtactatatacacctttataaaatatgactagggaactccaaaaaaatgttcaaggactaagttccaaatacatacgtatgcacacacaccaacatgcacacatgcacacacacataaatgaatgcatatattctcaggcaaaaagtagaccttaggcccagaaacaagatatttgcaaagtattgatcagaatactatttatagtttatttttagggataaacacattaatgtaacttcatcttcaaaactttttaaaaataattacttttcaaaataggcaatgtgctatgcaatggagacgcatctatctacaacaggaaatgaaagtacaaacatccattcccacagtcttagattgttgtttaaatatagatatatatttcattaaagtataaaaattaagtcattgacctttactgatttgataatagtacttagtctctatttattaaatattgtcatctttctggaatttactataatacataccggttaagttattaaaatttaatcttttcacatattattaaacaaaacctctcacttattctgtccttactgtggcaacaactgatgccacaaaagttatatttccactaaagcattttaagggaattttgagtaagttacttactgatcatttgatgagatctgttgactaaatgtggctttaattgctgatacttgaacttagagtgcgatactaacaggatttattattcactaagcacttacaatatgccagacaatgttttaagcactttagttatctcgtctgtttttttgtttattttttgagaccgactcctactctgtcactgaggctggagtgcagtggcacgatgtcagctgactgcaacctctgcctccgggttcaagcgattctcctgcctcagcctcccaagtagctgggattagaggtgtgccaccaaacctagctaattttttgtatttttagtggagaccgggtttcgccatgttggccaggctggtctcgaactcctgaccttaagatccgcctgcctcagcctcccaaagtgctgggattataggcatgagccactgcccactgcgcccagccttatttcacctcatttaatccttacaattactttaaaaagtaggtagaataataaactccattttacatatgatgaaactaaggcacaaagaacaatgatcacacagctagtcagtggtagaactctgtaatctgtgggttccacatctgccagaggatgtatgtaagtgatgtgcaaacactactccattttatataagggacttaaatatcaacactatggattttgttgtgtgtctgtgtgcaggggaatgtttctggaaccaatccttggaggaacaactgtaccttatacactacattgaaggctcacaataaaagtctttcaaccaggagaacatagagtaagatacaaaactgtgggatatagactatgactcttttgattagtatggaagaaaacatcctagtattttgttattggaagaaaacatcctagtactttgttattaaggattagcgagattgaatcattgatgtacttacagcaaatctaaagtaaaccatacaaaatagaactttcctcaagatgactagaggtcaataaagctatgggttatttacagtgtaatatgaaacagcatacaaccgcaagggagaaggacatactaaataaacaaaacctgcaaaggcaattttcttcagagaatctcctcatgtacaaaaatatatttcaagagaaagtagtatagttactgcgttttcataaaaagtctgtttggtgataacatatgctgaatacaactaaaggcagttcttcaagtctaggcagacaagctgcagtacagcagatacacttgctgtttaaatatcccttcaaaaaaaaaattccatttgtttaccaaaatctattcacacttgttgaaaagcatctttcttcacttatctgaatgtgacaatgaatcaaaagtaccttctcttctgttaccagaggtgataagggagaaactgagatcctcaccagaggctgaaagatgtcttttcagtgctcttgaaagcaaaggctaatttttccaaacaaaaatttctccctaaggagctgtattaatgaggtccaaagtaatgcttaacccttgactactctaattaactcaagctgactggccagaagccctctttcctgtggcctatatgggagagatcacaaaagtgcatggtaaccctatccccacttgctgttttcacaaaacatggggctttgttctttgtttggcggttgtgaagacatttcagtctcatctgacatcacctcctcacatggaagaagtgtgcatagaaacacctagcagcaggctgcttgtctcagtgtgttccataacccttgctagcacaaagactcatttccagctcccagaggtagcatccattaacacatgttccttgagaaatctgacttttcttttcaaaaatgggaacgagtgtattcttgctatacttttttccaaatgctccaaatacacaataaattatcaagtaatcaggcctagttatgcgattcccagctttcaatacaggtatattagaggaattcatttattcactcatttgtctagcacatctattgaaaaccttctacatggtagatacaaggctaatttggtttcattgaatctttcctaagcaattaagcccagaaaaatttgtcttctctctgtttgctagagcgatagatactaaagtatctataatactcaatttattagtagtaaatttaaaatgtaattacatttatttcaacttacatttaccaatgagtacctttgatatgccaggcacttttctaaatgccagggatacagtagtgaaacaaacagacaaaaacctctgccctcctgtagctttaattctacaatggaggaacagaaaataacttcaataagtgaatgaaatatataatgtgagagagaggtaaaagaagtgagcaggtggcactgaaagagtggacagagaaagcctcactagaaaggtgaacttgtaaagatgaaaggaggtaacgaaccatgttaatgtctgggaaaaaagcattcagggcaaggaaagactacatagaaaggcttggaggtgaaagcaaacatggtatttggttggagcaaatgggtcatgtggttggaggaaagtaaataagggttaaagtgtgtgaggggtgcagtcaatggtaaacttttggattttactctggggaagataggtactcattagaaggttttgaacagataattgacacagtctgatttagggttttaaaaagctcattctcagagtctttgggaataggttgaaaagcatctaaaacacaagttcagagaacaattagcagactattgaaatactatgaagtgattaaactttattgaattttaattataatcaagcacattatggtagaggcaatgagatttactgatagattggatgtgagatgcaggatgaaggaactgcaccttgaactcaagatgatttcaaggtttttggaaaaggcaacaggcagtatgaattgctatcccttcagatggatattgtggaaggagtaaattttgaaaggaatatcagattaattgttgacaaccaaaatttgtataaaatcaggtaataaaaaggggatgtgagtttagaatataaaagtaaaatgtggacgtatcacatacagatggtattaaaagccgtgagagagaatgggatatccaggggagtggctataaatagaaaaaggaagaggcccagacctgagctctcagggtattgaggaagaaccagagaaggagaccaaggagaaagaacaggaaaaacagaagaaaacccaggaaagtgtatagctctagaagtcaagtgaacaagtgttttgctgaggagggaatgatcaacgatataaaatgctgcttgtagtccatgaatatgaagactgagaattgacattgatggttactgttcaccttaataagaatattgaatacattatttacctaattaaattctagactcctggtagtcaggacttgtcttaagcagggaattgagactgagtcaaatttgaaagttattttatacttaagttgtctagaactctgaacatcatttttcatatcacatacgatatttcattatagattctagtgacttctcaagaaagcctactttttcccattgttaatacgtagaaccagaccaaaataatagaaccataaaatgttaaagtatccagtttggtgattattacaaatgcatacagttgtattcaccatagcagcaacatataaaatatttccatcacccccaaaacttccattgtgccctgctgtgctcagttcccttcctccaccccaacccctgacaatcattcatcagacttacctccctgcaattttgacttttctagaatgccttagaagtaaaatcatttaagaatttaacttttacactattatttaaaaataatttcatcagtaaatatataccaaccataacttaaatgtttaaaatatatcttttcttctcactaccacatctttagtcttaaaatggtcctcagagatcccagttcctcctgctgtgaccttagcttctagaagttctttagcccctttgagtttataaatacattgatttataattcatcatacatttattaataattatttcaaggaatagtcagaactcatttgcatatatatacaaacatagatatgtatgtaagtaatatgtatacaaacatatacatgtacgtacatgagtaacaacagaaaatgagttctgactactccttgaaatagtaaattattaatttattgttttggaactgtctctaatcctttatattctgaacactgagcacaataacagtaactgtaatggtcctataatcaattattgatatgtagaaaatgttgcagctacattacctatgaaatcacaatgttacttctcagtagtcctaaatttcagaagtagcatttgaatgtaaaaattggcacatttgaatacaatctatataatctttgtcgttgttgctgttgttgttgttttaattcagtctcttagtaacacagaaatgtatttccagagttttccctcttatgtgcctttaagcatataagattacacatctggctttgtaccaaaaacagggcccaacaggatatgaaatcctggggataacagcaacctagctatttctttttcaagaatttttttcaaactgagccagaaactgaaaagacagatgaaaatggcacaacccggtgacaagagagcaaagataaatcacgtttccttccataaaaacattaagatcttggctttaatattaatatttttggttacagttaagctttaaagttaatgaaattctcatttgtatgctgatcttgggacatgaataccaagttgtagatgggatagagattagcaataaagaaaattaaggaaaagaaaatgaaaaattcccatagagtttaacatgcatacacatatgcccacactcatatgtgggtaatatgagagaacctgcatattttttggaggttgcctttttgcaggagttgaaactattcatcattttgctgcactttcctgtggtataacctaactaagatttttgagcaaaagatagtttttgtttttggaaaattatgagtaacttatacgtgacctgtttactccattaggaaatatgctgttttattcaatggatcataggaacagaacgaagcagaacaatagcaggaaagaaaaaattacagtcttagaaataaaaacgtatttcatccattttggcaccaggactgaattaaaatgctgccactaggcaggattttaaacatacacccttttcggcatacaattttaatacagaaattgagatattaggcatgcagcgcatattagaacattgctctttctgctgcaggtgtgtttgactgaccctgaataaatgtcaagaaaaacacctttcctatcttttttttctggctataattcaccttctcttaatatttaactattgctccatcattataacaggcactctgtttaagtcgtgggtacaggtaaaattcagcagataaaaaataatcatattggaacatactaaatgtaatggagatttttggttgagaaaaataattggtactgctaatataactgatatagtcatcatatttcctatggatttacaaaaaaaaatttaaaaaagcaagtaagatataatagaagcaaaaataggaggtgaataattttctgtctttggaatcagtgtactttattattacacattcattctaagcctacgtcagaaaatacttgaagcaaataaatagagaacagttttcttttcttttttcgtcccttttcttcaagagaacatctcattaacattaacagaaactgtgcccagaaaaagccattaacattaatggaaactatgcatagaaaaacccctagattagtttttggtcttttaaggagcttatgcattgctgcctgtcccaaaaagacaggatgggaagatagtaatcacatttttgccccatctttttaaattatatatttcattaaattatatttaataaatcctgagttggaaacagcacaaggaaactcaagctgcaataatatttactctcccaataaacctggagctttcacaaaccatgtgtcttactgagagtcactgaacaagttatacgaccatgattctcatgaacatcctctttgtgcttgcaattaggctgcctgccaggagttgaaatgattagcagtaaatataaatttaatagctttgctttgcagttccccagtcactcttggtgcctccattcactagggagataatgtgaatcagaccctatcaactaaacatacgacaatagttgaatctgaattaaatatgagggaatcttaaaagggcaaggtaaaataaaaagaaaaattaaaatatgttctctatttaatagccactttacatttacaccaaaacactgcgctattttttataaatatcagccaaactcaaagtattagtacataaatcatatataatctaaaatttttaaaaacctgataaaaagaatgcttgaaaaagtataggttttcttttttttgtcacttgaaatagaattgtgaaaaatatttacatttcaaatatcattttgcttagctgttagagttccttagagttcggttttctgaaatttaccaatactttctcatcctctttcacatcatcatcagggctccacaggaaactgtcaataggtatcaatttaatgtgccttctttactaggtgccttactatatgtcttatcacttatctctcaatttaggagacacaaaactagaagacagcaatgaccaggaagtcttgtggctatgctgtagaatgatgatgacgtatataaaatatggaaagtctttatgctttgcttttgttctcatcagaaatagtccctaagtcttaaattgtgataaaatactccttcacattttctttcaggtacaataaaggtcagataaataagaagcaaaagaaaaagagtcagggaagagaagaacagttttcggcttagcctgatggcaaagggcttttaaacactcctcaaggaacattaagcaaaaatgagcctactgaaaacaactttccttgattttactccccagttactttcgttcttctctataacttcccttatcctttcatcatagatgtcttccttcatcactattcaatatttaaaacagctgaaagattggttactgggtaagaaaaaaagatacgatagctaccaggttgagcagagatatctttgagctctaccatgatagctgagatgtttgtcctgctcagcactgcctggcacatggtaggagctataggtgaaaagatatctctgagaagatatgagtttgttggtactagggcaaagcatggaggaaaaaagaaaaaagagatagagaaagaccatgagtcataatgacatctttcgtcccttcgaaccaacttttcttgagtccatagtattatatgctccgatgctttagccaattaagttaaatccatccttatgcattttaaagtattcgaactaaaataatatcatcaggaaacatgtgagtaaaagaagggccacctcattaccttttggcaataaaaggcagagtttaaattataaatatttacagaaatatatacaccaatggatttccaagaaaatgtgaatgatatgccacttaggaaaataaaacgatctcccagtataaaattaatctcactggaattgctgaatacacatctgatgctcaaaaagaatactccaagaaaatataaattgtttaaatataagtcttaataagcaggatgttaaaaactaaataaagtgacaggggatgcggtggctcaagcctgcaattccagctctttgggggagctgaggggggtggatcgcctgagatcaggagtttgagaccagcctggccaacatggcgaaaccacatctctattaaaactacaaaaattaaccgggcatggtggcgggcgcctgtaatcccagctactcagagggccaaggcaggagaatcacttgaacctgggaggtgcaggttgcagtgagccgagatcacaccactgcactccatcatgagcgacaagagtgagactccatctcaataaataaataaataaataaataaataaataaataaagttatgatgaataacaaatcaaacggaagcaaactgatcctcaaggtggtaaaactcaagaaaaaccctatgattttgctgatctcttagctgatgccacagaaagccaaacacaaacaaacaagagaaattatcctatctgaatacatcagttttatgatatttatgtaactactaaagcatttttttttaagtataactgatgcaaaactggaggaacgcaaagtcagctttctttgatcaaagctcctataacttctgattaaaataataattggatatagttcggactactccacatacattctttcactgaaattggacataatttagtgaagcaagatgctgagaagtctactgccttggcagatttccactgaaatatgtttaaaagcatagtttttctccacatggaaaataaattgtagaaaattaaatgtgagtttatataggattactttttttaataaaataattatcagatatccaaaaagggaagagaattagcaagttaaagaaattttattttgcttgaacaacaactaagtttcataaaccatgctccatgtgtcctaatataaaaacaaaactattaattttaatgtacagggctatgaaatggaatttggaaattatgttgctagaccaatttggttcctttaaaaaaggcaatctttatagatgcccagcaaaaagaaaggagggcctatttagagccatgttagaatcatgtactgtccaggtattaagaaagccactttggccactccaaaaaacaacaataaaattatttactttaaggcaaggcagaaagtctccacattaaatttttgaatttttacttgaattgactccaaaacaaatcaaactgaattacagttgaaagttaagtgaagctaaatataatttatattttctatatcctattccaaaacaaatattttctatgtaatactccaaactataaacgccagacactatgatcagcacatgttatctcattttttcttccataactaatatataagcaggttattattcccgttttacagataagaaaacctagagactgtaattaagttttcaaaggcctctcacagttttgtcgcttctttccactgatgtcctccctagtcttgttctgatgtgtgcaggagtaaagatttctatttttccatctggaggaatttcttagtggcacactccctttaatctgtgtagagagctcaaaatttccctcaattctcttgatccactccaaaataaggatgttctgaagatggtcacagacaaacaagcagggggcagcttttggtagaaggagcaataatgtccttcttaggcatcctcttctcagaaggaatcaacatgtagcccataaaaaacagaacccccatctccatggctgcttcccagagctcagagaaccaatccacctcctcaagtacaagagcagcaaaagaattggggttaaaatcttaactagaaattaaggaggtatcttctacttaagcagatttcaaaccgtgctccaaggaatgctgttacataatatattctatattctgcctctattggaaagaaaaacatgcaaacaaacaaacaacatcccaagtatccaaaaccaaaacaaagtactctgcatgtgagcaagtttggaaactctagattaaataaagttcagcttttatactgttttcattattaaccatttatatgttaatcagcattatgacctccgaaaaggctttaagttcatttatcatctgctgaagtagttcggaaatcctgcttcatatatcctccaggtgaagacttgaaaagagcagctgcagcccaaggcatttggttgaggattcagggacttggaaggccaattcttttccggatgtaacgactaataatatttaatatacaattttgaccaaaaatatttttgcatgaacatggcctaatgtattttacttaagtatatctttattggtaccatattaagaaaagcttattccttcttgaaaccatgtttaggcatcagttgagcacctctgaaactcattttaattttgcaggactctcagattattaggaagcaaatattcaatggggtcaacttagacaagatttccaaaaatgtgttcctcagcttgggttgaaagctgtaaacatgttcattattaatcttcaagagaataatatttatgcggcccttttccacttaattaatcattaacacctttgtcccagagcatcttaaaaggctagtgtttcaaggactatccatctgtttgaataccattgataaaaccttactgtttaagtttattcaattatcatgaataatgaattagagttttctttggtcagtttatctcttcaagatatcactaagctcagtcttgtaaaccctaacaaggtccagttttgaactagttacaatttaggaggtttaactgtcattaagatgcgaatgactcttccagaggacatggaccttgtcttgtacatctctgtgatctccaaagagctgtgcacagaattgacactaagttcaataaatgtttcttcaatatacgaagaaatgctctgttgccacttaaagtgcagagcagttttcatcttcaaagcactttattcacattaattcagctatttacattttgctgatgggtaaacggctggagaggctaaatgggctgttttaaaggctagagagagaaaatcctgcctgtcaggaataaaaatttgcaattactgattaccagtcatatgtccctggacttttgtaggaaaaaaacagagggacaaacaaaggccacctaggtagtggttatcctactgtcaggacaagtcaatagcaggtaaagaaacaagtacactagacggtccaacagctctattgaacaagtatgggggaaaaaaagttatttttgttgtggttttcagtgagtgtgtgcgtgtgtatgtgtgtgtgagcagtgttgatacacactgtgatgcagaattacctttttccatttgcaattctaaaacaacttccaggtgccatgtgctgtttacaaaggaattgaaatacatttgacctcaagcgtattttgctctggcaaagtgtgctaattgtatagatctaaaggcagcagcaacatcatcatttcaaaatagacattaagacaattaaaaaccccatgtaactctactgcaaagtaaagttctcatggagactgtgaggtgtgtacagatatgctgtgtcatacgtttctttatgcgatagtttatgtcccaaaactctttttttttttttttttaagatggagtcttgctctgtcgcccaggctggagtgcagtggcacaatcttggctcactgcaacctccgcctcctgtgttcacgccattctcctgcctcagccttccgagtatctgggactacaagggcccgccaccacacctggctaattttttatatttttagtagagacagggtttcatcgtgttagccaggatggtcttgatctcttgactttgtgatcttcccgcctcggcctcccaaagcgctgagattacaggcatgagccaccgcgaccggcccagctcttatctttttaaaatgacttttttgatgtgaattgggggaggacagagacaagacttcttggccatgtattgcttcagttctcagttgtgtttctctctattccttggaaaccttgactttcttccagtagcttcctggaaggaaaatttgaggaaacgtctaatgtacatagatactgtgtgtatagagaatagtccagttaggaaagtactctatgtaagttctgaaagtctggatttagggtcttttttttttttttttaccttgccatctacttctttccaccctgctaaaatcttagtaattaagtcataagagacatcttccttttatacccaaaaaaacacttgatgagatagaaaggagctgcgtaacattatacttcgtttgggtgtatcttaggaagagatcctgttcccttaggaagtgcaagggaggtggtgaggacataggcaatcaggaccaaaagtgtaggtgctattctaaaagcagtaatttagtagtcaggtgtcagatgaagacagcaaaaaatgcagttttgagtaactggagatggcaaatccccatgtagctggcttaggcttgaactggcaggtacctgacattcaatgcttgaagatgtagggaaagtggctgaggcagagtgctgggtaagggcaggactgagttggttggaaatgggcgtaagtacagcctccagtgtggaggttgctgacaactcagcaatctggtttcagaggaggtctgaagaaaacttaatgcaagatagtttgttagatcagaacaaccactgaaaattctccagaggaaataattgtgcttataacataggtggagtagatatgccacacccatttgacacccaaatcttcatcagcttggatagtaccagacagactcttctttaggtccacagggatttttttaatttctgacaatttctagattctaatccaaggtgacaactcaagaaaaaaattagtaaactagttgtgttctggaaaagaaaaataaattaaagccacagacaagggagaagaaaaacttctatgcttggccaggtaaaggcaagctttctctaggaagtacttatagtcacataaatactcaagaaatcatagacttctggagcaagaagggtcttggttatcatctggactaacagttgctattaacagattaaaaaactaaagccatgaggaattattttatgaaatcatacatctaactgacaaaatgaagactaggatacatttatttgcttgtgtctaatactcctcttcaatttggaaacctccagtgaagcagaacacctaataaaagttaattaggaacaggtactgctgagaccttctctaaaccccaggagcagatgcatctctttcactcgcctggttacctgaatgtaactaaacatgccatctgattgaacaaacaaacctattcttgtatttcctgggaagatgagcccctggatatgaaaatctcacacttttaaggcaaaggacttcaaagtagtccaagggtaagtcaatcagtaaaggaatataactatagacatgcactgtgtgatctggtgttaatctagaactatgacattttttgaaaagcaacaaaaagggtgttgaggtatagctgccaaaaccaattaaaagtaaccagaaaaaaaaaaaaaaaaaaagagaacactaagcaaacaggttttccctcaccatatttctaacagaaatgcatggccatcattaaggatattctgcagaacctattcaagaaagactgcacgtggtggataaccaaataaaatttccttgtacagtcaatgtcttggcatgcaatgggtcccgaggcataaatgcaaaccattaacaaagctttattaagaaagccttcaccatgctttgggaagatgtttgatacaattcaggttaagtgctgatcaataacctggaaatcaaaagaaccgatcacagaagcaaaaaaagcagatttaggcagattcccagccccatcccaaatgtgagatactgacaccaagcataagaaatcatcgctttttctctcccctccttcccccatcacacataccaatgccttttcctcttaagtcccctagctgcaaatatttcttagtgaagtctattttaccccttttacactcacaaactgagtcgcaggttgtacattttgtgataccatcattgatgaaattgatgaaagcctctaatggcattagaaaatcctgaaatagcacggctgatatatacctggcaggtaattgcttaaaactccagcagagatggatgtctaatctattcttaaaaatatgagcagacagatagcagttcacccctccactgcctctttcttgttctcccccaacaattctgctagttcatttgagtgtttcagacaagaaagcaagaatattatgcaccagaatataatgtggcctttcttgcacagcttctctttgcaatcccaaagctgccatttgcagcttcaagcaacagaaaagcatgcttactgttacttaagattaaattcttgataataagcagatttattgactcatgttttgaatacatatttattgaggcactctactagatgctgggcaaagtgataaccagaaatagccagccagaaacactttccacaagtcattaccagagatttaagccacagtaaaaaggtggaggagaatagacgaaaggttttagggggaaccccatactcaaactctccctcagaaaaacaattattaagtcttttcttacaaactgtagagtaaaagaagctgcccaatcgcggtggctcacgcctgtaatcccagcactttgggaggctgaggtaggtggatcacgaggtcaggagatccagaccatcctggctaacacagtgaaacccatctctactaaaaatacaaaaaattagccaggcatggtggcgggcgcctgtagacccagctactcaggaggctgaggcgggagactggcgtgaacctgggagtcagagcttgcagtgagctgagattgcaccattgcactccagcctgggcgacagagcaagactccatctcaaaaaacaaaaaacgaaaaacaaaacaaaacaaaacaaaaaaagaagctgcccaataatgtctgagcaaaatggaggccatgattattttggctgtagtgttttagactttcatgtaggagagaaggattcgctaattggttttcagtcaaataattctactgaggaaaaagaagtattcctgaaagaaaattgagacataacatggataatgtaaagcctatatttaatcttggtcaattccattgtctcattttcatgtagatgtcaaacataccagcaaggagaaaatggttcaaaaatgcaacccagggaattgccctacttttcctacttgcccagtcttcaatacaatagatctttattctgttctcattttctctaacaaaatctccttgttcggaagagtcaaaggaataaatggttggaaggttaatctcctaattactttctcccttcataaaataatttatttaattgtggaaattattatgcagctgtagagggagagcatattcattttttttcaggaagtagttgagcaagcctgacttacgccaagagaaaaaataaaaattcctgagaaaaataacaaattgttcaaaatgagctgggttaagtatccaaaccaaggaacaagttcatttaaatggttactcaggaaatcttgacggtgatctaaattcaaagttgcttttgtttttctaggaggcctggcttacagaaagaacatgataggttcctaggatatatcttaattttgtacttcatttaatattgttaaaataattttgtctctaatatcacagcttgtaatatctcaaacaacactgattactgattggtaatgcaccatactctaacagatatttaatctctatcctctccttccctagaaaaggtgtcatggaccccgggatgtattatacattgcttatagcattttgctgcaactttaaggcaaaaagaaaaaaaggtctctgtcctaatcaggcataacagccatgaaatcctatgtgcaaattgaatatcaaactaatactgtttttactaaccaaaatccattatctaaaagtttgaacaagtgaaaaataatttatttatttgttatggtcccaattaataagatgagaaacttaacagaataaacatatgactatccatttgtacacatctaggaatggaaaaatgacccactttaagtacaaaaaaatgagaataatctataaaaactaatgaatcagtccctttaactttgtttattggaattacaatatcaaagcatttctaatttgggttaagtaaaacatacaccaaagaatctatagacagtacttacaacactgtcagttgagtatttggctttgatatagctttgaaaggtaaaagacaaaccaagtagatttttttttacttggggaagaatgtgagaatgtgttaagtagctcagagtaatcattccataatgtgaacagataccaaaacatcacaatctaccccataaacatataatatataaaaatattatttgtcaattataaaaagcctatgttaattaaactcagctgaaccctgatatatacaaaccagtgatgcaaatggtgttcaccaagcgcatactcttagttggtgagcatctgtaaacatgctcgttctcagcctacagctactaccgtttggagatcacggtcagtaatgatgaccagtctagggaaagttcatggatagattaagtcactgggctagtatggatttgcactgaaattccaagcaaagcctctttcatttagtccaaatcttgttctacttgactgcaactagatttcccaatagggtctgtcaatcaaaattaaaaagaagaaatgtaataactttaatttctttctaaatctagagtcaggacaaaacttctaagtcattattaactggtactctaccaagaatatagctctcaattattcatttcagttcttaattattccctgtttcaaaaaatagcctgcctgccgctcataaaatcattagctggagagaaaagtgggttcaattttgattggaagtaaaagatatggtaggatgtttgtgaaataatgcttgaaaagtaatgttttaaaaagaaaaaaataaaaactttgttttgttgtacttcttgtttatagctttcatgtaaaacaaactatggttgtttcaagatggagcctcacgttcttagatttggtatgtacaaacaatttctcctttgacggaaaatgagacattttactttgccagttactttggtttacttgactggacttgtataattttaatgcaagctaagccaattgttttctaacaaaagctgtcataaaaaaatttatgcagccttggaaatgtaaacgtaaaaaagaaatgtaaaaaagtaaaacgtattcatcattttcctgcaaattgaagctaattacacttagaattacttgcccttccacatatttcatttacaacccatatgatcttctcagagtctcatacttaagttaataaattcagttggaatttttaaacacatttataagtatgtatatattggaaatagcaccacatgtaaggcatctctgaattttgatgagttgggggttaggtggggacattacacaattattctggtttctaagattaaaaaaacaatcttcctacaagaaaataatgcaaactgaagagagagagattctctaccactcttgaagaaaactttgggccttggggctgagaaggaaaagtaactcaatgagccatttgtaacacattaacactaattcttaaatgctatttgtggttaaaaagagatgaaatagacaaataacctggaaaaatctgtgacaatagaattcaaatgtaaattatcatgtctcactgccccgttagctatccaaaggcaaaactccattatttcattccccttctcacatctattacttattttcctttctcaattagttttaattaattgtttcttaaagtgtacttacacatttaacagtggttactgtgggctgtgccgccctctgattattagtcttgaagccatcttatgttattgttccattcctcacactcaaaaggtccccaaagaacaacctcctgaagttaggaccaatggtccctttagtttgtcataaaaccaaagtgatacatgtgtttaataacacagaatgtgtgccataaaaccctgatttgaatagttcttggaaatgtaggccaaagacgtcagatgaaacgtgccaagttgagaggtgcagataaaaggtaaaggtttattttgtaaatgtgtaatattttgatagtcaccagggaagaaataatgttactgcatgtggacgggcaaggtggctcatacctgtaatcccagcactttgggaggccaaggtgggcagatcacctgaggtcaggcatttgagactagcctaaccaacatggtgaaacgccatctctactaaaaatacaaaaattagccgggcgtggtggcgtgtgccagtaatcccagctacttgggaggccgagacaggagagttgcttgatcctgggaggcagaggttgcagtgatctgagattgtgccactgcactccagccaggcaacagagcgagacttggtatcaaaaaaaaaaaaaaaaaaaaaaggtactgcatgggccatcatgtgaacctgaactaatgttattccatcacgtaggatgatggcagtcacatcattaatctaaaatattcactagtttcttgcaaggacattaagtagacagattcaacaattacttttgctagataaagttagggcaaaagtatgacggacagctgaaaagttccattcttttcaatgtcccagcagataaattagtagcttaccagtaacatcaagcattttaaaaagagaggaaaaaacaaaacaaaacaaaacaaaacaccaccagtaatgatccagtttaataacctcatatatttggcttggggtaaatatcaagtggtgctgatcagtggaattacagatgtaattggaaatgttaaattttcttcttactcgactagtcacatagactattctatctatactaaggaaacatttataagattttttgcaaatcgacagaaaagagtcatcaaggaaaaaatatgataatttataattctgtttgttttaatgaggaataatatatgtgggagctgaaaatgttaaaatatatcaaatatttcaaatataacaaaatatttaatcaaagcaaaaattagttttttttaaagactgatacattctttcacctccatttcaatatatattaactctcctaaagcaaattagttaatacacagagcatttttaaatgaattataaggatagccattcaagaattgtttatcctggaaaaatatcagtcacaaattaaatgtaaaatagtgagcaaatggattaaaatatatacagcatgaaagattgctttgtctcttaggacttcacactttaaaatgattattattaacattgaaatgatttatatcagtgaaggcagacatacacctgacttcagggaccaatacaatagagagtatttttgaaaaatgtatattctctagacttgctgatttaaacctcagcttgtgaccaagaattttcatttttcagaacctgaccatgttactcttcttatcaccgaaatctgataaccactgcagtaccaacttcaggatgttcctagatacctttggatatgttaaaggaatcctaagatggttgagggcactccacatttatctaagcctttagaacaacaatcacaaagtccagtgactacagaggccagactttaaaaaggaatagggagaaataaagtattgccgacaggagagagccttccctgtttcaaggcagtagcaactattcacttccattcgatactctcctacagaaatgtagaccactttgttcgatattctgagcttttttctctctcttttttttttttaatagtagagatgttgatgtttatgtgaaacattctgattttcaaatgttggcaaccagtttcgaatattttcagtgtgcaaccaagcactatgcttgcaaataaaacacaggtatgggaaggctctgactgaaggacaattaatttacaatatctgattgtggtaaactatctgaaagatatagaatattatgttctgcatatatatgtgttcgtgtgtgtgtgtatatatatatataaaacaactacaaaaaattatattcatatgtatatacgtataattttcttctttctgtgtttacatatataaagcacagattgacaagctggcttattaatactaggtgtagatattttgaaagagataaacaaatagtattgaacgtatctaaacagacagccaaatcaacaagttgaatggcaacaagtaagacgtacactctatgacagtgactaaattaaccaagagttacagataagagagtgattagcatgcgataagaacattatagaggactacctagagaaggcaaggtttaaattgggccatgtgctgggaaacctggatatctatatgcagaagaattacattagatccctatctctcatcatatacaaaattcaactctaaaaacaataaagatttaaaggcaagacctgaaaatatgaaactactagaaaaaaacatagggaaaacactctaagacattggtctaggcaaagattttacggctaagtcctcagaaacacagggaacaaaaacaaaaagagataactgggactgtattaaactaaaagcttctgtataccaaaggaaaaaatcaatagaatgaagagacaacctgctgaatggaagaaaatatttgcaaactattcatccaagggactaatatccagaataaacaaggagctgaaacaattcaatagcaaaaagccaaataaacacgttaaagagtggacaaagaatctgaaaagacatttacttaaagaagacatacaaacagccaacaggtatatgaaaaagtgttcaatataactaatcatcagggaaatatgaaaatccaaacctccatcagatatccttacccccgttagaatgtctaccatctaaaagacaaaacagatgctggtgaggatgtggagaaaaggcaattcttacacattgttggtggggatgtaaattagtacagccattatggaaaacaatacgtagatttctcaaacactaaaaagagagctattacatgattcagcaatcccactactgggtatttatccaaaggaaaggaaatcagttcaaaggaatacctgtccccctatcaccatgtttgttgcagtaatattcacaatagcaaagacatggaatcaatcaaagtatccgtcaacaggtaaatggataaagaagtggtggtatatgtacacagtggaatactcttgggtcataaaaaagaatcaaaacctgtcttttgcagcaacatgaatgaaactgaagggcattatgttaggtgaaataagctaggcacagatagacaaatatcacatgttctcacacatatgtgggagctaaaaaagttgatcttatggaggtggagagtataatgatagataccagaggctgagaagggtgttcatgtgtagaaagggggtgaagagaggtaggacagggggtataaacatacagttagatggaagaaatatgttctaatgtttgatagcacagtagggtgactatagttaataaaattgcattttatatttcaaaatagctagaagagaggatttgaaacattcccaacacataaaaatgataaaagctcaaggtgatgaatatcataaatccccctgacttgatcgttacacattctatacatataacaaaatatcacatgtacccagtaaatatgtataaaaatgtatatcaattaaaaaaatcaaaccatgaaagctaattaagtttaaaaaatgatttcatataactttagtaagaaatactttaaaattccttaatgctaaaaaatttatcagaccagttaatatataaattttagttatataagcatttaaaaatttagaaatattaaaaactggaaataattaaaaatcaagataggttggacttaagaggtgtggcattaagggagatcagatacaacagactgagcaaaagcaagaaggtgagaataaagcgaaacccaggcatagaacctacaaagaatacagtaagaagtcaccagaaatgtcaagcagactgtttgccagtctgaactatcaccctatccccgtaacagaattccatgaaaaactaagaaaaaataatatgacaaaatatatgttttatttccttctttatgagcctgtttggttaacattttataccatgcaatgttaggttgagaactaaaccaagaaatatgaacacaggaatggaaaatagaaagaaggaaagaaggaaaggagaggaagagaaaggtagtaaggagggaaggaaggaatgaagaaagaaaaataaaagagaatgaggaaataaagaagaaaaatgtaatgcaccatgaaaaggagatacatatacaaatatgcaaagggacatgcagaaaagaaacattgaccaattaatctcattaatgggtacagctcgaaaactaatgtgcttaagtacagagggaacaatttaggataaataatatgaaagaactttatagttatgtaagaacactcaggcaatggatcatgctatcgagggaatttagagacactcttggctggaagacactaatttattatgcgctgatttaagtataattaaaatcaacctagatattaaacaagggaaacgatatgtaacttttagatatccatttattacctaaggacagagagagcagcaaatgtgcaaatgttctacagccagattaatcttcctttaaaaagctcccattcataatatcactcccttttgaaaatactttaattgactctacatgatccatccaaattcataagtggagtattcaatatccatagtctggctttaccctactgtttcaatcatgcctcccacttcttctagatgctggccatctacactcattaggttgatctactccccatactttagggtgcacaatgtttgcccagcgtaattgctcagtgattttttaatggatttactgattaagcttcaaaggcatttccaactccacagaatgtatgctaattctaacgttacccgtatagaatactaaaaaaaaattttaacattctccaaaactatggctatatttttctcctcttccattttcatccttaggatggttttccaaagtaaaacactggcctgtgaaagctactgaaataatcttggtttcttcagtaagaaataaattattcactatcatccccactccaatgcaatcatagcagaattatctttcaaattatagccacatggtttctgaagactaatgaagaggctcagcccaggagacagttttgggatccaaaaaatacctttcagtttctgctctttctaattcggacagtagcaatgaggccacactgattcaactggtaagcttccttcatatttttcattgttgttttttcccttagtttcaagccctacctgagccttgcccacgctaccaccactctgtctgaatttttgcacctttatttcatccaggttgatactcacagcccctgagttttcctgactgtctaagacaacagtctaaaagtgaaaccagaaagctaggggggagaaacagtgtcacacaaaaattctggcagatactgccacctacagggattataaggtcatccccaactcaatctcctaaaaaatcactcatttataatagagggggaaactgggcatatttgaactacacggataaagaagaagccaatttcatcaaatgataacctttgatttagtgtatggaataattatatatgtatatatgtatgtatgtatatgcatatgtaaatcaatcattaaacagggccaataaaaacagggctgtaagaaagaaaattaaaggagaaatatcaggttgtgccagtcgataatttctgttactagaaattattaaaaatcatattggacgagttgattacctatttttggttctatatgctcttgaaaagtttatgtaacactgtatacaacatgatagaatatttacctataaccaaggtgtctaggggttgacatttttatcctataatatttgaaacttaaaattatattttagttattcacaaataattcattaaaattcataaactaaatgataaactatatcattcctgaaataactaatataaatgtagctatttaaaatatgagatgctggctatttctgtgatgatttaatgccatgttaacaaatatagagaagaaaatagtataaaagcatatttttagtatttactgtttaaaaaacctttagatctatgatttttaaaaactgcatttgaaaataattacaaacatatagaaaaggtgcaaaaaaagcacaaaacatccctttacccaagttcacctattactaaaatttaacactaggatttttctcaatttatttaatttttttctctctctgtccacacaaatacacacacacacacagaaattgttttttttcctgaaccatttgatggtgaattacatacatcatggcgctttacctcttaaatattgtgtatttcctaataataatatcgtcttacataatcataatgttaccaaccaaataatctaatctaaaaagtagattatttgatctcatctacaatctatttccccatttcctgtcaattgatccagaaatatcttcacgctatctccccctccagaacaagacccagtctaggaaagctataatctttgaatctgcttttttaggggagaagaaggaagagattccttattttttagctgcgtaggctcttagctgtgtcaccattgcaaccaaatggcttgagtgtgacaactcccattcatctttttggtctaccttttcctttaatacatcttggagtcagaagatggataataaattattttggaattatagatgggtaatatttaatgcccaatataagaaggactgaagacttctaaggtttgagggcagatgattttttttgcatgcatttgacagctcaattgatttttacttcttcataagttacctaagtgctatggataggtgatatggtactactttaggtgttgataactgaattatgtcagtagtctagggatgacaaatagccagaaaaaaaaaattcattagtttccccaaattggtaaacagtttttgggaaattggaagaataatatgagtgtcatggagacactatcggctaaattgacaatcagtaagaattaggtaactgaaaacctagctctttaagtgtgtatgagaggagagaaggcgggttaaactggcagttataattaccatgattcattcaaaagtatgaactgcagtagttactatgcatttccaagtagattttcaaaactcctaaattggtgggagtctaaattcgttcaaccattgtggaagagagtgtggtgattcctcaaggatctagaactagaaataccatttgacccagcaatcccattactgggtatatacccaaaggattacaaatcatccttctataaagacacatgcacatggatgtttactgcagcactattcacaatagcaaagacttggaaccaatccaattgcccatcaatgatagactggataaagaaaatatggcacacatttgttagattatatagagtaatgctaaatatttaaatcagcaaatcatctgttccattatagttttttaaatgattattttgccactacccaaggatgctgtgaaaataaatgataagatattctatcaacaaacaatgaggctttcaattaaagctgattataacttacttttaatgtatattgctattatacttaggctaaaaaaccagtttacgttaacatagtttttatgttaggctaaacatcaatatacacaggccaagttttctttgaataatcttcttttgttaatgaatggtccaaatctttaccccacctaaaattcctttctttgtgttttttacccattgaaattctgtatcgtcatacttaggtcagtcttctgggaagtcttttctgaaggtttcaatttattcctcttaagaatttattttgcatttatgcattctaacactcattttcacattaccacttcatgttgtaaaattttcaagtaattttagaccctacataaataattccctaagaataattttgttaattttatcctattttgtttcccctgtaacactcagtacaaatgctctctgattggtgggtcctctataatagttggctatttcagatgaatggtaaaagacccctctcacatctgggatcatcaggaggtcagagtttcagcaagcattgcagttatgcaaatttctatttgttactattacaataattgctagcagctagaagaagctagagtaatgatgtattttttcaaataagtgccttagaagattcctaggaaaagctaattgcaaacacctaggagagaaggcatatgcattatctttatctgtatagccagagtcctactagttacagagtggcaaagaagcagcatccaaataacttgtcttaggtatttgtgaataactaaaaatttagataattgcatttgaaaataccatattttagtgcattctatatgtggggtccacctctgaacacttgcatccctagagttaaagagagctagaaaggacaaatggacaacagacagcgtctctgcagacgaggtgattctttgagatgttattaaaatgagtgctgttcaactacgtgattgactgtaatatgaagtcacgtgtggaaaaaacaaaactacaccctgcattataaacaccattctagtgataagacatcctctaacccacttgtaaaattaagaagataaaaaccacttagttagatttggcttaaccatagttaaaacaagtttctaacatgaagtaaaccttaaccacaggcttcttctttcagaaaagcaaatacaaaacagttatagctagaaatcccatggtgtcttttaaagtactgaaagttttcagactatattgctgaagcctgttgcatgtagcctatgcatgtagctgcttgtctcctgtaggaatcctagcttacaaagtctagatgtgaaataggtcctgggttgagtggggcatctataagttaaaaatattttcaactgtgtagagttctacaggttctccagtcttatgattgggagaatggtgcttgctgactgtcagatgcttctattctcacatccatcttaataatatattcacacaagcatatgctgttaaataaacaaaagcagtactgatgatgatctggtatctgtgagtgtgaaactaatttttttttaagttgtaagtcatttgcaacctagacacttacagagattattggggtaaaattgtggactctagaggcaacagctccaccatttattgattacatgactagcaagttacttaacctctgtttatgtcagtttcctcatttataaatccaaagctaatattagcttctacttcatgaagtctctataaggagtatgctttttactcaagcagagcacttgctacattgctcaaacaatattagcttgtcttaataccattacacaaatacatgaagggcaaaaaaaaacaaagtctaatttctccaataaacaaattgctcatgtcatcaatctaatcaccatttgattgagtttagttgtttttcttttcctgaacacaggtccattgctagacatgcacttgcttatccagagggccaatcagatttctgaaaaagttccaagttttggcatattcctctctttctctttgactgactgacccatgattcagaattgcaatcacaaagtgcccctgatgctactgttcacactgtcagaggatagaaacacacaaagtttaatcagattctcagtagcaatgtgatgtcaatcgggatgattaaataccagccattctaagcctgccttgcaattgttgtctgagaattcacctgagtcctaaggaatgtgataatcctaggtctgcagagtacactgacccagagaaagaccactgacaacatctacatctacctttcttttggtatgggggtgccagagagggttaaatttacagtgtgtataatcatctctgggttgaaagtctatttgccaggttcatattaacaatatgttttctctaagagcatagcataaagtagtgaaaatagaggtctttcagcaatgcatggcttttgcctacagcagcagagagggaaggtggaaagtcattgctatgaaagaggctatttgttgtttataaagcataatttttaaagataaattgctggaaacatcgatgccatgaacataagtagacattgttcactttatggaatccattttatatccatttgcgctgcctgcttatgaaaggaataaagggagaatttcagaaatggctaagcaaaaaagacaaagggtggccattttgttaaagttttaccatccaagaaagtgctggcaaagaagtggagatatatccacaccaaattgtcaccactactgataaataactcagagaactgatctatataggtgacaaatcaaaatggatatttgcatacaaagagaagcaaatgatatggaataccatatcatatcctcatgacctagtgtcaatgtgactatgatggaagccataagtgacaccctcagcaaaataattcgaattcattctagtgctcctgggctcccatagcaccttgtatatacctctttgataaaacttactatgttttactcttcctccttacccagctagcttttacactaaactgtgagctatttgggaatagagattttactttccttatctttatatatacatagatttatctcagtgccaagcacataataaacaccaaaaatgttgaatattgattggattctgtgctttcatctttggtgactagtttaattgaaaaaaaaagcagtagttctgactcaagagaagacttgagcccccagaaataggcttgttttcattattatctgtaagtattccagtatgttaaccatgccatttaactcactgcctgtatgtagccatatgcatatcagctgaactattgatgccaaatgaaagtgggattatataattcaaaccaccccttgggtttaaatttggtccaagacttgcactctttatatttcttattttttttccttctattagtgaatttctccattactcctggggaaatagataattctcctttaagtagattcaattactgtaaagaaatcacacttgatcactttgaggagatctaagctttgctcaaactacaattcaatgagctgacctagagttaatcaccttttactcattcatttatcaaagagacaagcacaacaatggatggattttggcatgcagtcttcatgcatgcaccacattaattaattcctattaaggaggttttaccagcacttgcaatgaacactaacacttataaagacagcacagtccacattcttgctgttctgtctacacttagacatcagaactagcaaaggatgtattgtctatttttttctacataaaataaagcttactactttgtgcaaaccacttacctactgataagtccacactctgctagtttcagtgttctcctaaagaagcaaaagtatattactgctaaatgttcctgtaaggactaatttccagtgaggtgtatctgtcattttgtacatctttacaatttctgaactgcagaaagataacaggttttgtagaataaagaagaatcatttaggaattaggtgttagatacctatctatatttttttgtttctactcagtatcacatttatcttctgcgatttataaaactatacctccttttacaggaacatgatgcttcccatatcacatccaaatggagcccatagggattgctatgttcttacatgaccatacacccctggccagagttggtagattgaggagtaggctcaaactgggccaaacacagtaccttacctccctgaacacatttgattggtccaggagtgggtacctcacttagcccactgcatctagagccaagtgtctattcccatctttatcctgggatatttggattttagatggtatcttcaaaaaactcagatttgtttcccacaggggctaaagatttatgcaataaaacttaagagttctcagaaactaagtttttcacctcaaggaaaagcctagtctgcagtgaaaccaaatgaagctgacaagctgagagaggcaaagaggaaaaccagattgatttctgacagtgcctgaatcccgagggctggacttcaccactcttctttcctcagctttgttatttaaggtttctttccattctgggagccaataaatctccccctttgcttaaatacttcaggctgcctttctgacagttacaaaccaaacaattctaatcatattcattaatagtgcacactaaaacacactgtcaaagacagttacatttcagactcttcaaaaaaaaatcaatgaaagtgacagaagtttaaaataggatatcagtatgcaccagtatagcattcttatttccccatgtttcttctctaatcaccctactagattttcatagagtgtttaatatgagggaaacaggggaggttaggcctcaggcttctagtttctaatgtatttatagggaaagaaacaattgtaaactagtaccaaaagctccaaagctttaaaacaagcaaataaaaaaaaatcaataaataatatgggatagaaacagaaagtagattagtggctgcctgggactgggtgtgggaactgagaatgactaaaaatgggtatgaggtttctttttgcctgatggatacattctaaagttggattgtggcaatggttgcaattacttagtaagtttactaaaaattagataactgtatactttaaaaattagtgagttttatggtatgaaaactatacttcaatgcagctgtaaaataggcaaataaagcaaacaaaaatagaaataaagagtatgagcaattctacagattttaagcagctagagaaaatgattaccaataataatctttaggaattaaaattaacaccaatagaagcagcatgctgtaaatgtaaatatagttcaatatttcatttttaattttttcttattgtggtataatatacataacataaaatatactgtcttaaccattttaagtatacagttcagtggtactaagtgcactcatattgttgtacaacggtcaccaccatgcatctcaataactctttctatctggcaaaactctattcccactaaacaataactacccatttcctctctctccagcctctggcaatcatcattctaccttctgtttctataattttcactactctaggtacattatataagtagaatcatacagtatttgtcttttcatgactagattattttacttatgacaatgttctcaaggttcatccatgaaccctgcatatgtcagaatttctttccttttaaaggctgaataatgttccattgtatgtatacagtagtccctccttaaccacagggaatatgttccaaggcccccagtgcacacctgaaataaggcatagtaacaaaccctacttacactatgtttcccgcagcttttatttatctgggaatatcttaatttctccttcactttcaaagaacagttttgccagatataggattcttggttcacagttttgttttgctttatttttttattttggcactttgaatatatcagcccattgccttctggccttcaaagtttctgaagagaaatcttagctaatcttattaaggatgacatgtatgaatgacttgcttctctctcactacttttaagatcctctctttgtcttttgacggtttgattctaatatgactcagtggtttccctttgaattcatcctactttacatgttttgaatttcttggagttttatatttatgttttcattgaacttgggaaattttcaggtattatttttttcaaataatctctgtccctttctccttctcttctccctctgagacttccaaaatgtgtgtgttcatttgtttgatggtgttctataggttccttaggcactatttacttttctccaatcattttttactttctgttcctcagactcagtaatttcaataggtaaaaatcttgacctatcttcaagctcagtagttcttcctcctgtctgctcagttctgtattttattccctctagtaaatttttcatgttagttattttatttttcagctctagaacttgtttgcaatttttaagattttctacgtctttgttgctatttccattttgttcattcatagtttttttcttaatttcttcctttattcttagagcatttttaagacaattgttttaaagtctttgtctagtaagtttgccatctggtttttctctggcacagtttctatttttttttcctttaaatgagtcatactttttcccaattctttatatgtaattttttttttgttgaaaaatggacatttgaatttaatgatatggcaactctggaaatcagattacctcccttcctaaggattgctgttttttggtttgacttttcatttttgttcttttgggttcttctgattgttgcaggctgtctttgagccagggatcagcctgagctataaatttgaggtcttctcaagtttattctgggctcatgcctttccctgagtatgcacaccgactttctaatttcctctgcatatgcagttgcttttgaatgtctaaatctttattttctggctccaaaaaaagaaagaagaaaagaaaagaagaaaaataaagtgtgtgtgggaaagttaccaggcctttaaatcctcctcttagctggagggaagaagggtttgcaacaatgaggagagggtgaaatgatgagtccccacctctgtatctgcacctacatggtcagagacagtagtcagaaatcaaaacacaggtctctggtatttgacactttgagtcttatttgtccatcatggcttctacaagctgcatgcaagcctaacacagtatggggagtagagaagatagatagttgctgctaaactaaaactgactaaaattaaccataatttatcatccaagtcttcccttagaagttatacacctttaatagactccagagattaaaaatagttacttcagacagattgtatcagtgcaattattgtctatataaaaagacagattcctggtgcttcctttttttagatcttcccagactcctctttgaagattattttttatcctaatctacatatagtttcttcagataaagatctgaataaaaaaaagactacgcattgagtacaatgtatactgctcgggtgatgagtgcaccaaaatctcagaaatcatcactaaatcattattaagaacttattcatgtaaccaaataccacctgctccctaaaaacctattaaaattaaacaaaaaaaacagtgtggaaaaaattaagaagcatgggaattgtaaataatcaaggatgtataatatctatgaattttataagatacaatgagataaatagaaaaccttagacagctttctatccggtaaaaacaaatggaattgaccatctattgttaaaaaaaggacagttctaaagatcagaggtcaactgtgagtgatgtgagaatataattagccacagaatattatagtacttcaataaagaaaggctcctatagttaaaaacatacaagtcagacaaaggaagaacaatacatctatgatccataaagaattaataaagcagaacaaaaaggtattctgcagatataatttgcctggatgttttgcaaaaacttttatgaagaatttttcaaaagaaagtcatggaaaataaagaccaaggaggattttgaatacaaattaaaatttcattgtttgagatcaaagagtatacctctaataagcattaagaaaaaaaagcatttaaatgtaagcattttaatgtattaaaattattaagatcactgttgcccaatagattatattaaacaaccttaacttaaaatgaaaaaattgaataaaagtataaaatcattcaaaattgtatctatagtggaatttcatcaaagctgtaaaataactctaattaccaaaattatatctattttttaaacctgttttcctatttaagttgattactccgtgaggtaatttttactgccccagtaatgcgattcaagttttttacatctttccacagattcttttattatggaaagaagacactaaaatactatccagttgaaaatgtaattcctttcttaatatatcccaggttatttttgttagtaagtgaagtattcagggaaaatatctctagcatccccaagtctatagagtagtgtgggtaatgaccaataaggaactattttggggtacattcatttattattttgcttggggccctcaggcatacatatacacttccctatccctaaaatacaaaatctgctacccaagaacaattaagaaaaaaaaaaagaagaaaggagggacgaattatgataatttaattacaatgctgacaaatgtatacatgaagttcaaaggttattctcatatgctccttctaagagtacaaattgttatataatttggtaagatccttctctagaataaaaaacaatacaagtttaaagctttaagattggatagtatttttgatcctgtttttttccaccctgacatttattttaataaatacatgatgcatatgtagaatattttatctaaaaagatgttagccacctttttccttataacagtgaaaaacggaaacctctgcctataagtaagagatgcataaaataagtatggtgtattcatataaactatatgcaactaataaaaatgatggccaaagttttcacagtagactgagcaaaaaactatgagacagtacacacatttctactgtttaaaaaaaagtagacatttgtaaatttgtacaaaaagtagaatgttcttaaaaaagtagaaatttatttgcatatttaagttgacaaatttgttaacttaaaaatctaagttaattcacatgcaaataaatacatctagaattatatatatatcaatatgtttttagcatttatctctggatggtgagattataaattattttactttgttctttgcttctctttgtattctataaagttcctacaataaatacatattacttttggaataaaaaaggaataaaggttatttctaaagttaaagtaaaaaaattaacagtcatataatgtaaaatgaatgtgaagataccctgaaaatacagagtaaagggatctctctctaggtagtaaaaccaagggctaagtctttttagaggccccattaaataagtaggatagcaagtaatacagtgtatgagaaagggcaaaggtctcagcactagcgtgcctgtgttttaggttaggttttaccatttagtggttaaagactttgggtaatcattgtttgacttttcttactttattttttgtccacctataaaaaattacgtaaatggttccttgccttttatcttacgggttacctcaatgttcaaacatgtgcatgaatgtggacacattttataactataaagcaataatgtaagtttattaaaaagttgttaaaataacattaaggagaaaagcagacaaccaaataatagcacaattcagtgaaaaaagaaaaaaataaaccaatacaatgtaaagtttcacacgccatgttttaatccttatctagttccttcattgaaaggaaattatatgagtatgtaagataactatcaaatcctacccttttcctaaaacatcccctttcaagtcagttgcaagtaaactcttaacaacaaccacagtactgctattggtttgaattacctgcaacatgtaaagcatatatgcgattcacaaaccactaaagtgctataagaaaatgtccttttggttgtctcttatgtaccacacaaatgctaaaagaacaataacaactaatattttcattgaaagtctattatgtccctggggctgtactaagtgctttgtatgtattatcttagttaaaccatttaaccatcttcttaagtaggtgttattaagtagccaattcaaagacacatagaggtacacaggtggggcaggcattaaagcctatgtgcttaatcactacataaaatgccttctgttttgcaatatgaatggatattgtggtgaataagatatgggctctgtctctaaggctactgacatttaacagtggaggtaagatatgcatgcattcccaaacaaaattcaagttgagatcatttggacttctctctaagagtagttggcattgtatctgcgtcttaactttaagcgttttcaccagtcattcaggcacagaaagttatatatgtaaagacagaatataaaaaagataagcataggcgtttataatatttacatatgaaattatgtatgcaatatacacattacatattattccaggaatacgtattttattcatgagccaacattatgctacttgagggcagaatgtgaccaattcttattacaagactttcacataatataggacttacacactcagaggcagatgctgaataaatgccctgagctgtgtttttaagaatatttgtttcaaggtacgaacatgacagatttggccatagggaaggtgaagcaggggaaaggctagtaagatagacgaaatgttgtccagcagcagaaatggaggcagtaagaatggagaggaagaaacaatgcaaataaagtccaccagcgttgggcagtctgtagtgagaaaagtttaaagatctcttttaaagtggcactctggatttccaaggaaaacactctattgtcaagtaaagtgaatgtgttgcttggtaggatgatcttctgaacacattgaatttgaggtattgaggggccatttcatgactgggattagagctggggatatggatttaggagtaatcccccgagagtggatagatgaaaccttgggagtagctagtaggggagagaaacaaggagggcaattataaaaaaaaagaaatgaagctgctggagaaagatccttcaggaatatttataagaagttgagtgtgtgtgtgtgtgtgtgtgtgtgtgtgtgtgtgtgtgtgtgtagggggagtcaaattagaggaaggaattaaagggtcacaagaatctatccattttccaccacatctgatccataatttctaaaagcttaaatagaatccacatcattgatagatttgtctttctataagtctgtggagcgttcatcagagcccacaggatgcaaaagtagtacaaaatgcccatcaaaatattctccagcttcaatccatttaacataatttaactaaggtaacataccttagttaagacaatcatcactatttgctgacattcatagacagtacattttcttacaagcatttacttcataaaacaccaagagaaattaaactatgttggaacagagtgatgtctaacacaactggaaaaggaaaaaaagggttctggacattgttatcccaatgttaatgtcctaatcttgatttttcttacaaagcaactggttttctttgaaatgtctaattgatgaatacaattaaaaactaaagttctttgtgaaggaaaaaaaacattatcttcagaaaccaggaagctgagtgttaagccattgctttgtttcaaatgcagctgtatcttgttgcatgatagcatttatggcatcaccagtggaatattgtttttaataagtgcaaaactggtgaagacattggtctcctttagaaagaaaaagttaataatttcttctccaccacatattggctaccctgtttattaaaagatagacatttttgacatttggaaagcaataattgattctacaatattattaggagtccatatagatagtgaacctttcctgtcaggatacgacaaaaaacgcgtaagatagggacatccaaggatcacctaccattcatcacacgcaaggtaactgctttcccctaagttcactcaagcagaaaatgaacagttgccaatgatgatcagagagatagaaaatgctgcttccaggaatgaaagtctctttgttgttgttgttgttgttgttgttttaaagttaaaccaatattctatatacttttgctgaaatagcaagagggccagatttgataagatcacagtcctggaactgatcagttgctccttgatgtgtttacagaattttacaatcatataaccaacagatgctcaaaagtagcctcaaaaccaacaaagacaaacattctgttttcaatctttggtgaattattttgaagtttcaaagcatattgctcagaatggaattttacaaagataatctttagatcttagttatttggaggattataaactataccaatttactgttctatcattggaagaactgcaagtattttttgctccccacaaaactaaatctcctctgaaaatagaaacctatttcaataattcaatttgtattgcaatcaatacaaattgattgggtgcaataaaaagtacagctaattcttagaaataagcatgcttatgtcattaaggctaaaactgctagcatgagaagctcaagtgaaataaataaagtgtattcttataataagcattgccaagccattggtagttgaagacactattcaaagatgcaaccttgtctttcattggtgttctctgtctgcatagaaagggctgtgaaaggagagatgcaaaagaggcaaagaaataggaaaaatgtcttgggagaaggaaggatgttccaatgatatggaataacaacaaaaaagttaacttgggacaagttattatttaataatactggagacaattccaaaaatattttgaatcacataattatgctgtggaagaaaaaaaaattattcaacgtccaagactttgtgtttgtgaaaaaactgtcctctttattttatagcccatatattctaaatgtttacaaagataaacaacattgtttttgtgaccattaaaatatgatatgtgaggaagtatgcagggcttgggacttgaagattctgcatcaaattcagaataaataacctgtgatttagctacaattcgggccaaaccttcatggctttttgacatcaagaactagtacatagtgagggatcaaaggatgcaaaattgagtgtaatcaaggatatatgattttttcttctatcaggtaaggtacaactgctagtattgatgaaatgacaacttaaaaaaaggctttctgggccagacgcagttgctaacgtctgtaatcccagcactttgggaggtcgaggtgggcagatcaccttaggtcaggagttcgaaaccagcctgaccaacatggtgaaaacccgtctctactaaaaatacaaaaattagctgggcatggtgatgcatgcctgtaatcccagctactcaggaggctgaggcaggaaaattgcttgaacccaggaggtggaagttgcagtgagctgagattgcgccattgcactccagtctgggcaacaagagcgaaatttcgtctccaaaaaaaaaaatggctttctgttacaaaaatgacaggtcagtaatctgttacagaaaaatttataataagaaaatgtgagtaggtaaacacacctaaatataccttaaagattgctcaaaaaaagactcaagtggattaaggacttcccaaagtattcttagtggtgcttgtcaaacactatccagaaagccctcggtcaggtttgtaatcttttcggtagtgttcatttgttgcaataaaataagtcagcagttttaacaaagaaaaaaattctataatgtttactgtttaatactaaacacaacagtgtgagattatttcctgggcttttaaaaattatacatatcttttttttagaaacctttacaaggaatagtagcatcctatgaaaagttggcttaatatttgattatatatggtgtgtatgattatctccataatttgagacattaggctattggtcagaaatgtgatctccactgtaacagcattttaggggaacaattatatttgatatttctgttttcaatttatagtgtctattctagaaatataatctgccataatctgtcaaaactgccaagactgtttgtagtacttcaatggtactttacagctaatatcaccaccacccaacacccatctgcataatgcatttaaccttacaaagaatacttttatctattatattacttcattttcaaaatggtcttataaaacaggtagagcagggattttaactgaatttccattatgaggaaaataaggtaacaacccattcctggcaaaatctggactagaattcaaatcatttggctccaaactaacacatgcttctccaaaaagcagcccagtatttccagcgacttaatttaatgaacagattcaagacatgggttaaaaatgttgaggatgtcaggctgactgtcactgagtatacttcttgggtaaggggcatccttactcctgttaagatgatcttactaacagctaaagcagactgggagaattttgacaggagaactactattcttttcagacacagatagttcccttttggtgaaacttgttgcaatgttccacaaagtgttaccgcatctggaaagtccataataattttgatttatctgcactgacagtcagcagtatgttatattcactgttgcataatattattatctgttgatcttcccagtagataatatattcctcaaaggaagaatcttgcttattttttaactctgtttagtgccagccatgttgaagttgctcagtaaaatttgtgggaggaatgaaggcaggaaggcaggcaggcaggaaggaaaggaaagaagggaggggatgacgaagttttggaattttcttttgcaaaacactctgctaattgaatttatgacacaaaagagttcagggacaacaacaagaaaaatgtttgaagtcattgtagcgaaagagtatctcaaaaacaagtaagagaatgacttaatccaaccacttgatatgaaaattaccagtaattagcctgtgttaaagagatcaacttttttacacaactcagcagcaaattggttaacttaaccaaagttatgcccaaattgctccttatccaaactgatttctatgttttggtttcatgaaactgatctatcattcaggacaataaactaaataagaactaggcgttttatatagtgttaaggaaaaaacatcattactggcactagtatcaaataatattgctttctttggcaagcaactcaaactaggaaaatgaatttattaaaactcttcatggaccttatatcaagtctgcaatctcctaaatgtaaaactctgcctataaacattgtcagggtaaaattttgccttaaaacagagtaattgcttctatttcctgtgatgtttacacagcaactccttcagaattactcttaaaaagaaatagaaaagaaaatcaatagcaacagtgcactatgaaataaactttgtggcagaaatggaaccagaagattaagataaaaccataaaagtatgaaataataaaaagggcaccaaattcactccataaaaaagactaaacatgatttcaaatgtatattacacacacacacaatggaatatagacattttgtatttcacaagaacatttttataaaaaataatttgcaaaaattaatccagtagcaattaatactattctgcctaacctcatggtattgacaaaccttaatcagatattatttgtaaaaatatactttacagcattattacaaatgtttcattttccaaataaattatctttgaaatatttttactttgtataaaatttttaaaattcaagaatcatatactctctcttgttaaaaatgtcaactactaattacacaacttactataactgcttttactatttgtatgcaacattcttcttcattatttgtgttctactttgcttgttttccaaagtctctggagatattcttgtaagacaaatttaaaacatttatcaatttttatcttaaatattaatttgagttgaaaattagacatgtttaccttaaatactgagcaaaaataatttcaactatatataacagttatagatctatcaatccaaaatgtatatatatatatatatatataaaacaatactaaatgtagtatcttaagtaattttgaaactaacatgaatttccaaatgcttctttagcctagcagacgtccaatgatacacggttgaaggtaactgcttcaatggcaatcaatcattaaccatcaaatccactcaagactagaatcaaactttcttctattaaattacccgcgcaaaacaactgagttttcccatccaaaccattggcctctgcaacttgtaagagtagagggaaaacagacagatctacttgataatcaatttaaaggttatcaaggctttctttacttttgctaacacagtttctattttgagccttcttggccaatgtgcttctgcctaagtgtcacaatctgttttaggtcttagctaagaaaatgtcttatatggtttttacagttaaggattgacaactgccttttgcttttgttggtaagcactcctctaaagttctcttgcctgatcaaacctcacaaaaatagaaattggtccttattctgaatgtttaaaagtccagtaagcatttactttttcttgacgtgtgttaacatatacacgttttgatctactcttgaagtaattaatttaggaaagtgaattaccaatactgtacaaacacatgatgccatatggattttcagggctgaaccaagttcataagcaagatggcaatgaggagacatctatactttatcttattgcaactaccactttgagctaagtacacagagcttgaaggagaaatcattacttgcttctttggaaaccaaatccatcctctcaaaccctatggttttcccttccctttgttaggccatactgatttacattgtatttcagtattgaaatttacatcagaccaatttcacattgtttagtaacttgtgatttatgtagtattaagattaattccattatgaccaatatcctgtcatatcatttaattacattgacatttattgtaattacatctaataaattagatacatttaaatacattccagctaagaatttaaacaaatgagagccacctggcacaatgagagaaactgtttcagtacagagacggcaaagacactctctgctccccaagttaaaatgatttagtttgacacaacctggaggaatttattctgtgatcacgatattttctcttttgcataagatacacaaagtttgagatggaatttggtggtaattagaaggcagagaagaccataagaaatatgggaggtcatgcttttctcttttcattaaaaagttatctaaaatgatagcataatccttgatagtcatttttaattggcaattattgagtacacacagtgcagccagaattgaactgaagtgtcacattgtcaaatgtgacttttcctgttgcatttgctttggcagcttgaacataactattaggaccaagaagaaataaatacttcacattctaaagaatatggggccagatcctctttccagagctatgatcaatagcaacccccaccgcctaatcctccttccctaacacactttctaatctacataaggtgatctgaggatcagaaaagagaaagagacaacgcattcttaatggagaatacagaggttgtgttctccgttctccgtcaaaacacccaatttaagtgcgattgaactccaaaataaataaagacagggacactggcatgtcacttccagggctctgtacttactgtcagtggagtgaagcaaagaacttttaactcaatttaatacatgatccctgtggcttgaggctatacatgaggagagagaggtgtctactcctcacctggaggtttctgaaagcaagagactctccaaacaatctatcctagggtgaaagaacctaaaaagccaaggagaaaagccctctctgatcctcacaaccccctgaggttgctgaagaagacctcaatgggtaactgacctcagtgggtaactgagcttcatgtggagaagtatgaagtagaaggtggaagaagaacgacaaggtggtctagataacagtcatattaacggatcctcatggaggagtgagggacattagctgcttatagaaagtacggtagcaggagcaacagcatgttgtgtttacacactttgacatcatatatttctggatgaagcctcagcactatttttttttctttttctttagacacagtctcactctgtcacccaggctggagtgcagtggcgcaatctcagctcaccgcaacctccgcctgccgagttcaagcgattctcttgcctcagcctcccgactaggtgggattataggtatgcaccaccacgtctggctaacttttgtatttttagtagaaacgaggtttcagcatgttggccaggctggtctccaactcctgacctcaggtgatacacccacctcagcctcccgaagtgctgggattacaggcgtgagccacccaccgcgcccagccagcactgtcaactcatttaaggtctctgagccttactttcctcctctgcaaaatgagaacaatgtgctctacctcacagggcttttatgatgaacaaatcggacaatacttttagaaatgatgtcaaatgattacactatgcaaacaatgatattattacttaacctatatattacattcaacttcactgcttgctcatattatcttactatattatatatattcttaggacagctggagtcttgtactactttatgtcttgtgtattctccaggtgtgctatatttagcataatctaagaatgatttgcaatgacccttatctttgtataattctcttccctttgagtgtgtgtgtaacctgtaaatatgacaatatatctcaccaatgatacaggctgagcaagccaaatctaaaaatttgaaatccaaaatgctccataatctgaaactttgcagccaatatgacactcaaaagaaatgctcattgaaacattttggattttggattttcagatttgggatgctcaacttggtaagtgcaatgcaaatatttcaaaatctgaagaaaatccaaaatctgaaacatttctggtcctaggcattttggataggagtactcaacgtatgtgtgtgtgtgtgtgtgtgtgtgtgtgtgtgtgtgtgtgtgtgtttgtgtgtgtgtgtgtgttcaagaatggaaaagccactaagaatgccctccagctgacaaccagcaagaaactgggacctcagtcctacagcctcacagaactgaatactggtaacattctgaagaagcttggaagcagtttcatcttcaaatcctcaagataaagagcccagtcaactggctccttaatattagccttcttgagaccctaagcagagaagcaagttgagctcccacagacatgtgatctacagaaatgtaagctaaaaaaatatatgtgttttttggctactaactttgtagtaatctattatttagtgattgaaaactgatacagatgctaaaacctatttattaaatgcatactatttattaaatgaaagccattgattgaatgttcatgaagcaattaatatataatatctgagaacatttcatgtgaggtcttgtctgaaaattcttctgaagaattttgaatccttattagaatctgaaaaaaaatctcagaggctaatcacaactaggattaattggaagacatgaataagcacccctggtgatgtttaaaacatttgttgagggtagagtggtagagtttagcaaaacctgtagtcaagtaggatggaggctcggcaccaatataatttggccaaaaacttccatggtttactcataggctgatggcatgtagattacatacaatgaaatgataatttttatgttaaggagagaattctcaaaatatttgtaaaaatgggcagtttgggatggctttatggaaaagtggggttcatgttaagtctcaacaccgagtactaatgactaaagtaaaagaacactgatgaggaactaaaagaaaactacagagataatcaaatctgctcccctgcctcaccccttatgcattataatatgtcatcattccctgccaaaaatagaattccttttattttagtatatctctagggaataagatcgaagaacactctcctaggaatttaattatccttcgttggaggaaatcctctcgctcaacatgaaggcaaaaagtaaaggccatttcatcttgtcctgcctcccccccgcctgttaattttaaaacacatgtttagatactagaatattttaagaaaacagctaccatactggcatctggtgctattggcaaccagtgcaaggataagctccagtgagaatttaaaaatgccttttcctaaggagaaactgttaaaaaaaaaaaacaacctgattatcaattgttccccaattcatgaggaaaaagaacaagtattatcaaagagctaatttataaatacctggatttacaactcttttccactaagtatttccaaaataattgttctcaaagttaactgtacactagagttaactagggacctttaacaaattttgatgcctagtttctatgcctttaaaaattctgaactaattggtctggagttcagtttgtttattgtgataatttcaagagctcccaggtaattctaatttatggcctctgagctatggtccaggattacatgcatagtagacttctgaagaaagacaaccatgagttcagtttatttctccactagaaggactggattttagagatctctgaagtaaaatatccatgcatatttgctctgaaataaaaatgttacagaacaatgcttttatttcaaggtttgcatttttccaaaggttttttttttcaattcctctgtttgcaatgcagcaatatcttgtttgaatgcaaattaaatcttcctcttaataagaaggatgtgtctctgcctcaggaccatgtacaaacagtctggtgatggcaggcagtgacccagggatgttcatgatggactgagagagacatggcaaacattacaagcatgcattgcaaatactggactgtggaaaattaatagttttaacccttaagccaacttcacctggcacagtagcatattttagcaataatttacctacattttacactaacttgggggaattacagacacaaagttggaaataaaccatactgaagatagcattatactttaccttggctgaaacttgggaagcaacacaatttggcctttatatttaaaaatcacggttcatttgacgtcacataaatgtagagagaagagtggaaatttgagtgagaaaagctattaggaagtatatttactagagaaggaatagaattaacagaacttagtttttttcatcttacattttcttttgttgataacgaatcaattggaacatttttgaggttgccagaatcttctgattctggagcctaaataaggttttttactggcaggttgaccgaataatagaaatttcatggccagaggccaaccaacactttataaaagccctctggaccaggtggttgacaagcccaggacttacatgaatgcaaccccagaagaaaaacttgcaagtgcctcttcaatagccatccaagactcttgcttgaaattcaaggcagctgatggtgatttcgtcttccatttacaacttctttattcttataaaaagaatgctgtatccttttctttcctccccaacaccaacagttcactcgttcaaaaactctaaggcattcagttaaaagtagatgaaaatattgtttgccagaaacatcttcaaacagaatatgagttttcacacacggaatgctcattagaagcagaagcaaacgtatcactgtaacataataatagctcatattgagcaagtactctgggctgtgtgcctaacatacaatagctcatttaattaaccataatgttgggtggaagctattattttcatttcacaaattaggaatctcagacacatagaacttaaatcacttgctgaaagccgtacagaaagcagtaaaagatccagtattcaaaagtaggtaatttggccaaaagtgtccactcttaattataccactctattgtagctattgtgtaaagtggcccatgagaacaagcaatgggtaccttgccccagtggaaaaagataaattcagggaagtttcttgggtaagtttatttctgcactaagtgaaaatgttaaataaaaaaatatatggatgaggtaggcagggcccagtggctcatgctagtaatcccagcactttgggaggccaaggagggcggattacgaggtcaggagttcgagaccagtctggccaacacagtgaaaccccatctctactaaaaatacgaaaattagctggtcatggtagtgggcacctgtaatcccagctactcgggaggctgaggaaggagaattgcttgaacccaggagcggaggttgcagtgagcggagaatgcgccactgcactccaggctgggcaacagagcaagcttccatctcaaaaaaaaaaaaaaaaagaaagaaagaaattatatggatgaggtagatggaggacgggggatggaattcctggcataggggatagcataactgaaatcaaaaaggttgaaacaaagcaaaacaaaaaaacaaacttacattgtgtgttgggcagtttggtacagtaaagagataatataaaaatcaaggagatggcactggagaggtgaactaggagaagatcatggcagtcttagtatcacaccaagaactttgactttgttctacaggtcagaaaatctcaaatatttctgatcatgacccacagaaaaaaatatattttacttggtgacaaatacttttttaagcatgtattttacttctatataataaaagtttatatatctttattatacatgttatttataatacgtcatattatagataatatcacacacacacacacacacacacatatgtacactcaaactggttgagcaccctaaatccaaaaatttgaagtttgaaatgctccaaaatccaaaattttttgaacaccagaatgatgctcaaggaaatactcattagaacattttgttttgttttgttttgttttgttttttttgagacagtctcactctattgcccagtctggagtgcagtggcacgatctcagctcactgcaacctccgcctcctggattcaagcaattctcctacctcagcatcctgagtagctgggactacaggtgtgcaccaccacatccagataattttttgcagttttactagagacagggtttcacgatgttgaccatgctggtctcatactcctgtcctcaagtgattcgcccaccttggcctcccaaaattctgggattacaggagtaagacacgatgcacagccatcattagagctgggctctaatcatcattcatattttatattttcatatttgggatgctcaaatagtgcaaatattccacaaacaaaaaaaccctgaaatctgaaacacttccggttcaagcattttggataagggacattgagtctctctctgtctgtcgtgtgtgtgtgtgtgtgtgtgtgtgtgtgtgtgtgtgtatgcatctgtatagttggcccttgaacaatgtgggggttggggtacccatacactctcagttgaaaatctgtgcataacttttggcacccccaaattttaacaaccagtagcctactgttgaccagaagccttactaataacaataagcagttgataacacatattttgtgtgttatatgtagtatatactgcattcttacaataaagtaagctagacaaaagaaaatgttatttagaaaatcataaagaaaatacattgacttcattaggtggaaattaatcatcataacagtttcatccttgtcaacttcacattcagtaggctgaggaagagaaggaagaggaggggctgatcttgctgtctcatgggtggcagaggcagaagaaactctatgtataagtggacctgtacagttcaatcctgtattgttcaagactcaagtgtgtgtgtgtgtgtgtttgtgtgtgtaagagagagcattttatatatatatatatttgcaattgaatgaaaattttcaagaaaattaatgaatcttactattcaaatattcatattttctattctatttcatatcagttctagactatttaggaaatgagtaggcctctcaattcatttttaggccccattaatgagctataatactgtttaaataacactgttatgggtgttggaaatatatgcgctatcatcaaaggattttgattacaggagacatagtttagagtgttacttcaactgggtcactctgatagcagtcattagctgtctgaagatgattttgagtcatttgccaagctcaggcaaaagagaaaaggggagacaaaatcaagtctacttagatgccacaaaaaataaattgaataacttagagtctccactaaaattataattctttattagaagaatgttaaagaaatgatccgaggaccactattcttgaatatccttaaaagtgcaatacaaagccagttagattagcagggttactgacatacccgcctgaaggaaaggaaacaaacaggcgaccactggtgccctccagctctagatttatttccctggtcactgactatctgaaaactaattttggttgcctgagaataaaaagtcaaaagtacatgagattgctctgaagaggagtctacagaaatgtattagaaacagatgaatagtcatgaccctctttactcaatccactcttacacaaatgtctatgcaactacagaagagaattcagtacctatttatcaataaaagaatatgagaatgtttctgcaggctcctaaaaaaaacctttcctatgaacagaagataatggggttattatagacaaggcaacagcgccttctgaaatattgcaaactaattaagaataattattaataacatttttggtggtattgtcttatgcttgactaatttgtaaatattctggtatatttgaactttcactattttagcctgtaccctattttttagcacagattttaattagaaaaatagaagtaataacaagggaaatcacatgttaactaatgaactgagcctaacaacaaaaaagacacagggaggcccttgaaggactctctagcttgatgttcttcttggaatctagggcagggcaaaagtcctaacatcactctatggacaacagagatgaaccacatgagccaggtgctagaactgtgatatttatctctgtttccctgtgtgtaccaccaccccacaactccaaaaaagaaaaaaattataaacacatccactaaaattggcaattctagagaaactggatggcctgttaacatctggctttcccaaaactcaatttttctgtaactcattcattttttagcctttgattctgaagaaattacttgcctcctggccagccacagaggctgacgcctgcaatcccagcactttatggggcaaggcaggtggataacctgaggtcaggagttcgagaccagcctaataaatatagtgaaaccccgtctctactaaaaatacaaaaattagccaggcgtggtagtgggcgcctgtagtcccagccacttgggaggctgagacaggagaattgcttgaacttgggaggtggaggttacagtgagctgagattgtgccactgcactccagcctgggcaacagagggagactccgtctcaaaaaaataaataaataaaaataaatgaaattacttgcctccttccaggcttgctatagataaataaacatatacgcgcaatctatatttctccattacactgcaatcatttccttgtcactagaattgtatcttgtagtccaagaggtaagtaatcggaactgtcaggacaaactcttgggactgtaaatgtgctatctggagcataactatcctaagaataaaatccaaaagcaaaaactcatcagaaaagatttgaaactcatttcagacaagatgcagactataaacaaataaatacacaatatgaaagcaacttaagtctcatgatggaaagattttgatccaactgattattattgttcctagttcaaaatattttaggccttatcaatggcaatgcataacaggaatgactaaggttagcttttcagtgaatcatcagagtagtgattaaactgatgacatacaagactcctaactggattttgaagattgagtacagtatccaaaactagcactggaacaagacaacaacgttcattcagcccacaagaaaaccagtttaaaactctgaaacaatgacaccatgagtatatttgtgataattatttgccatgccaattatattaaatcatgaggaggtagtacacatctacatgcataacgagcccatttttatgttagcatatctccaaggactttcctgctgtgtattttatactgctactgccttatattttatgttagcattaatgttttaattttcatatacatatccttaggccattttacgaagggcgtggctttaaaaattcagttgatatattaaattaatgttaaaaaaaggtcatgtaacaagtagtcctaaatcagttctttgtgttccctctgtacattcaaaccttctaatatggtttatttattatgggtaatacagaagtaagatctgggctctaaactctgaccatctgtcaggttaacatgcatatgcactaagtgtctttcttcagatgatggatcctaccacaagtcctccctaaaacaatatatcaatccccttccccacaaaaataaaaaaaattgatttatatcaaaataaatacataaaatagagcttctctctaaattggccttctgattagaatactacttcatcacctcagaaaacctgtcttaatattatacaggtagaataatttaccaaggtgtaaagaattttttaaaaaatacaaaaaagagacaaaatagtgtagtgattaggaataaaagttctagaacaagacgatctctatcagacccagttcggccattgactgtcttgtgagtctggtccagttatttcaccttttagagctttagttttctcaattcaaataagagtattcaccacaaggtttatttaaaaaaataaaagatccatgtaaagcatttgtatcaaattcaacatatttattaatattactattgttactaatacacagatgacttcaaaagctgctattaaaaaccaagtaaggatgtgggtggcatgctgtattttagattcagattcaacagccactatactagttacattcatatgacattcatatcacattaacgtcatagcacagcacagcaattaagaataagggtctgtctggttttaaaccttagttctatcacttattagctgtatttaattcagtaatcttcttaacagttctataaaacagataatagtattacataccttataatgttgttggaaggattaaataaattactatatgtcaagctcttagaaaaaaaaatttgctgttgtaattatggattttatttcagaacggaaaatgtccaaatatttaaaaagccagaagaacaacagaaccagtcttgtagtcactgaagtaatgataatttaaaaaatcataataataaccattaaaacagtaacatgctatacttagctcaagcgtagcatgctatcatttgcctacaatttcactatattacccacatgacctctcaacaagcctgtaatgtgggtaggctatagattattgccttcaaattatatttcatgaacttgaggttcagaaatcagtgacttgctaagccacataatagtaggtgttcgagccagtgctagcatctaagcatgggcctcatgatccaatgccctttccacttcactccttcacaatggccgaagaaccaaattcaaggcaaggccatccaacaggccatcctgataagaacccctcctgaaataagacaacacggtcacacaaatcaagtgcacatgctttctaactcaatggttataaagaagttataggtaacaactgatacatctgcacaaaccataaggccattaacacaaagatgcattttaaagctaaccagttccagcagattatattcatgtaaagagaatttggttttcctttccttctgacacttcattttccctttgtctcccaaatctgttaataactatttttaggcagatggagcatttcatgaatgggtcactcttaaaaatctcatttggtttccaatttttcttcaagcattaagacttactacttttagattttttggttattatacacaaaagaatatatgtggatagaatatacacacatttatgcaaatatatatatatatatagcatgcatatatatgcacatgcatgtctatctatacatatacatttacaacaaagaaaaactgcttaattttatgtataagagattcagagaactagaccaggtaacactcagaatatacacattattaaggagaaagcaaaaaataaaagagaaatcagtaaacacacaaatcttcccattgacaaggttccctttctgagcttcctttcactttacttctgattttcttctcatattatgtgcttcaggtaattctgcacattttcttctcctgaagagaagccatcaccagaagaaaaagccatgaggtctttttagagagaagaaattcacaaatactgttaggcagggaggcagtcaacaagcacttactgaatccctagccccctaagcactgtactaggtgcttagaactgagtccctcctgctattcagttagaaggatggaaaagctatgacttctagtattagcactgacctagttaagccatgaataaagaattaaaaggttttcatcttccaccatacaagttaagaaaacaaaaccagaaaccttgatatatgtttttcagcccaatgcattatggtttcacatatgtttcagctcttattgaaattttttagctcaatttcttttggtctagaaagttaaaaaatgtccaagtcaacaactcagtaagaaatttagaaagtttccaaacaactcagttttggaaactttttagttcagcatttcccaaactctttgctattgacattttaggctagaaaattctttcttggaaggagcaggggcctttcctgtgaattttagagtgtttaatggcatgcctggcctcgactcattagatgcctgttatcacctctccaaccgagtggtgacaaccaaaaatgtcttcagacattgtcaaatataccctgggagcaacataattcctgagtgaaaactatctaggccaaaacttcacctaacacataactctattagatggatagcatgaaaggatggcatataaaggtctggaaatagaatgacattaaacttaaaataatcagcctttttcctaaaggtatttttattcaccttgtacataacattgagaaaacatcacttgtccaatatcaaaaattggggaccttaaagcaatacacccctggtcttcccaaatcactgctctggcttgctttagtttgtaacattaaggctctgtttcctagaaagtccagagctaagacatacaggttgctttcagttcttcagaggcaaggaaactaagaaaggtggtaatcataagaacaccacacataaaaagaaagggaagagtaaaccgagtttctgttcttaaaagaaacagtgggaaaaaagagaagacatacattatcatttcaaagcaatttatcttaacaataattgggcaaaagacattgtttttagttgtgttcttgcagaagtaatgtcaaatttacttgaaagttagagttttagaaaattttagatgcagggagtacatgtgcttgttacatggatattacttgtgtaatagcggggattgggtttcttgtgcacccatcacccaaatgttgaacattatacccaataggtaatttttcaactctcattcccctcccaccatcctcccttttggagtttccagtgtctgtcatctccagaaaatcagataacttaaaaggtttcatgcacgttaaatagttaatagttgttttattacaccaaaggaaaaatgaaaaactgtttttcccaaaacagcataaatgtttattttctgtatgtttactttgctgtcccatttctataatatagaaaagtatattatttgaatagctaaatgtatttatcataaatatattacttttatataaatatagtaaatatatcttttactttgggatgtaaacagagctaaaatattatattctcaaaagccccaaaatagtccttaaaaatcattgaattaatgtggttatttaatcttgctcagcaatttgatgcaaacgcctaaatacaaaaagtggtttagtaggtactacaaaggaaggaagaaggaaggaaaagacttaatactctagaatgtttcctgaaaatcagaaaacaagtagcattcaattgtagctaaactaactaactaactctctctctctctctctctctctctctctctctctcctcctctccctccctccctccctctctgtcacacacaaaaacacacaccacaaccctgattaaatacctgttggaagaaaggaaggaagcatatgaggcagcatggaagagagaaagagagtgacaacctcaagagacatcattgacttgagttctagtcctatgatggatttcagaaagtggtcataatctctttaggcctcagtttctcatatgtaaaatttgagggtttactagaagatacatgtattctcttcaatttaaacagtccctgattcatagtgtgtttcagattagggtagtaggaggaagattctgagtttcagaatctaagaaaaattaaatgatctaagttacattctaaaatcgatatgagctgcaattctgagaacaacttggccagctagcccgaatatttttggcaatgccagcaacagattggctggatggcactgcacaagagaatctttttaacacagtctgctcaatctggtctatccaatgttctgcttgggataactttaaatttgggttgacttagaacttgtccttggtatctcactggctgttaagaggacagtccatgataaatgtcttcttcattaaaagtcaattcttgccaactttttcatgctactttttttctacaataccacatataatttgagacatactgcccacaaaacagaacctacagaaggttggaaacaatattctattctctctttcagagacatgtaacattaaacagggttcaaagggaatgcattagaagtttacagaggaatttggattacaaatggttcacaggaacagtaagtacttttttttggcttaccagctagaagtgggacataaggtaaacaagctatgagtagatttctatagaggtaaaacacctcatgttacatatcaccacacccctgctgtataatacataccataaagtattattacaagatttaaatatttacatcaaggtttgccaatgaaaagagctttgagaaccatgttagcttgtagctgccaaagacacaagtaacagcagtagttgaaatcaggcagtagtctggggaaaatggggaatccaagaacaaagccatgtatgaatttctccctgtcttccatttcaaagtgctctttgtaaagagaaatacctaacaatgcttgagaacagtttatatttataattgtaataaaaaagaaaatactgaagactgtatttttaggtgtcttagttcaaaggagcaaaacactttgtcatcctaatcagaaaagacatttaagataacaactggagaaaagtagctttagaaataagtaggaaacatgtcctaagatattttaataatgtcaagcagctatttgcacaaaaatatggagctgctccacatttcactacatcttccagggagacggtagtagatatgagtaggtaaacatccctaacctgtctagtcacatcagcatattagccacagagaaacaagatacataaattctgggaccacctaaagtgatttgttgatcagctctgtgcataattactgcttttgtttaattacttttaattacctgtttttcttttgtccttatgccctgaggtgagtttttcatcagtaatgggcatgattttatgaatatcacatgcaaacaagcaaattagacccactgaacttgggaaaccatttttccccatcccttctctaaaggttagctgctattttctgaaaatgatattgattctatggtaacatgcacaaaggcactaatcaggagaacaggagcttttgtgaattcagtaaagcttataaaatacctcattataacatgctaccaatctatgaccccaataatagcagtcccaaaattataaataaattagatgtttaaattgttacccttttttatactacatagtgtaacacacattataatttccagaagagctcttaaagaaaaaaaatgtggagaatgaaaattgaaaagcagcagctgcttaggagtgcttaacctagagctagacgtccaggcagatcgaaactgcctgctgctcctccttcccttttcctatactgcctacaaataatcggtttgatttttcataccacgattttgattaagcactgtgtcattatttctgggtaataaacagtttttattattttcagtttaaagcaattattgccaaaaggaatttttaattttaatattaatttatttagagacaggctctcactctgttgtccaggctggctggagtgcagtggttcaatcagacctcactgtagccttgaactcctgggctcaagcaatcctcctgcctcagcctcctgagtagctaagaatacagggcggtgcccccacatctggctaatttaaaaaaaaaaatttgtagagacacggtcttgctgtgctgcccaggctggtcttgaactcctgacttcaaggaattctcctgcctcagcctcccaaagttctgggattacaggggtgagccactgtgccaggctcaatttttgtttttaatgataatagctaattctgatgagaatccttgaagcaaaactctcacaccttgctagtgttccagcatgtataatcccctgttatagcctgaatgtgtcccccagaatatgtgtgttggatacttaatccccagtgtaacagtgttgggagatggtgtctaatgggaggtgtttagataatgagagctctaccctcaaaaatggattaacactgcaatataaagagctttggggagaagggttctgcccctctgctcttctgccttatgaggaaaaggattccttccctctgggggatacagcactcgaggccccatcctaaagcagagaccaaacccttaccatcagacaccagatgctggagctttggtcttgaacttcccagcctctagacccatgaggaaaataattctattctttataaactacctggttttaggtattctgttatagcagcaaaaatggactagagacatctccttttaaaagtcttgcatgcactgataattgttgatgtggtaaattgaattaaataaaagaatctaaaatgactgtcttaatttttttaaaaacagttttccattgacaggtgttcaaaacagcattatttttaacttttgggtttgtgtagtaaattaattaggggttttcttttatatttgtgttttccaatttttctttaaggaggatttagtatttataattacaataatttttagaaaaacattctcatttaaccatgaaaagagttttaaggtattcacaataacgtattagagctcagtagctttaacacatttctttctacaggtacatgacataagtgcatgatgatatttactaaaggatagaaagagaagtcttaactatcttgaaaacatgaaacaatttaatggtgagtttaaaaaaaacctatgtattgcaattaattgacaaataaaatattgagacatgggctttaggttcctctgaggcaaaaaaaaaataccctgtttattaattttttgtccccttctccttgctgttgtagaatatatgaacatggtcttataataggttcagaaccatggatagcagatccatgcttttaggtagatgcggcattatcttaagagacaaagtatctgctgatcttcagtctgctttgtagtggcctcgttatgagggcaaatcagttaccttctctgggcctcctttgcctcactggtaaagcaattcattgccttgcctttccaataggggaaaattagactaaataaattttggccatttacagctgaggactaggacttttttttaatcgttctgatacacaaataaatatgctctgacattattccacggatgagttttactttttttgtttacttgaatgagaataatggataagaaaaacattttcaataaggttaatttatcaatatatctacttccctattgtcttcagtccatagttctagtaatgagcgcaccacaaaattgataattccatcagattatcatggaaaacgagcattgttgtatgaacgtttttgtgactactgcaaaggtcaggaacaggtctgctttgaaaacttcagataaagatagtttttaaaaagttccttaacacacagtcctaggagtacgctattaatttttcaacttaaaaaactaaggtttccatatcttttttggtagcttcaagggaaaggaaaaaaaaaatgccttcacattcctaattattttgaaatatttttcattggttactacttcttaaaaattcattatccttttttttttttttacttttagattttatcaaaaccatatagctatttcctctctgattgacaaataaagccactatcggtttggcacaaaatctagaatatggtagactctcaataaatgttagatcctctttttcttctctcctattctttcctatttctataaggtacatttcataagattttacatgtggcattcatcttctagatcaaaaaatgtatcatttaatggaaaagaataaagtttaaaatcctagattagtgtctgcgggtgttggtaaagctgaatggctcccacgttttggataatctcattcaatttttcttccatatttttccttgaatttgccactttctttctttcaaaagccaaggctctcaatatgtttggattctctgttaagttatgctgtttattcaatggaggcatgaattcaaatttgtccacataaatttgacctcctaatgctacacgttgttattggatttctgttgtttctcttttaagtggccctggttgtcttaaaacctgctcattccttcttcgagctgtcgccatcctctacaatgctggaaattcacaatcatgaatattatacagggagatacaataaaaatctatgtctttataatagagtcaacaggtataaaaagaaagttatttcaaataaaaagtttaatattctacatttcataattattgggaagctttgagagtcgatcccaggaatgctcttatcacattattcattgtggagaaaaagttcagtaaagtaaatatagtaattagagctcatgcaagaccatcagatggtaaaatatctaaattatctcactagaaggctgtttatagcaagggaaactaaaatatcattctaacaatgtatacataccatagagagaatgatattgagtctaaacctccaattaagtataggcattaaggatgcacatcattagaaatatgctgtgacttttgtttcagccaattatagaaggaagttagagctaagaatttcttgaaaggtgattttagatgtgagtgaagaggaaaagacaggaaataaagctatcatttattttttgtcttaggacaacactgaatatttgtcagaagcatctgctccttaaataacacaattgaataaaaattggcatctgaggtttgaaagttaatttcaaaggtttattataccacagggttcatatttagcagctgtcaatttgttatcgacaagtgtaataaaattcagcaaaacttgaaatcttcccttgccaaagagacagctgtttctgaatgttggagatttggggagtttttttttaaaccaacctctatttgaaaaagaccttacttttatttatcaaaaaagtcatttgatgataaaatattgatattctttaactgtgtttgtaaaaaaaatatatatttttaaatgtgggattttgttgttcttgctgattcaatatttgtagacagtgtttcaacctgggtaatgtggaccctccatgggatatctggcaatatctaaaagtgtttctgtttgtcacaactagatactattggcatctagtgtgcaaagaccagggatgctgctaaacattcaataaaatgcaggacagctcccacaacaaaggattatttggctcaacatgtaaattgtaacaaccttgagaaaatttgttttaaggaaactgatacaatggatttagattaaagattagtttgcatttacagactttctaaaccatggttttcacctggtggggagctgcaggcaggcaccggttgtgctttaagtaagtgttatttgaacaacagagtaaaactccttagctcgaaattatagcaagtacattcgcactgatgtaattaagtttgtgtcagttacactgaatatatttctatgtacaacattttgtaactgtgctataaaaataaatctgtaaaaagttcgacaggaagtttctttaggtagtaattgttttctacagatgcattagctaatattctacacagactccataattcatattaaacaaaaaacttgaatattgttttagtcctaccttttaccccattattttctcaacttgacaatactaataagcaaatctatattttcaaacaatatctctagatcacacattccttaaataattattttaagtatgctacataaccaaaacagacattttcagggccgaaataaggaccagggatccacattttgttgaatgtctactcagtcattgagaaaagtactttttatttaatatcaatttacttcaataaaaatgtcacctaacatgtaaaaatacttaaagagagagtactatttaacccatgaaaaataaaagaacagaatgagacagctgcaaaatcaaatgtatttaggtgttttagctaaaagtatacattattccaataaaattaccttttgcaaataatattactaagaagaaatttaaagaaaacatactccactatcataatggtgattttcatttaaattagaaacacatttcaaaattcatgaccttggaaactctcatttcatttgagcctccagagtagtgtgctgtctctctctgtctctctgtctctctcaatcttttaatttaacaaatacttatatagcatttacaatatacttgataattgtagaaatattttacaagtattaactcctgatgaccctataatgtaggcacacatattatcgacattttgctaacagtggaaccgagtcatgcagggattaagtaattggccaaggtcccatagctagtaagtgacagaggtaggatttgaattaaggaagtctggttccaaaagccttcctctttagcgccacgtaggtggcctcccctcttcattacatagtattacaccttttatttatctcaaacttgcccaggtagtgtgaccttggaggagacatatgtgaaaggtttcaagtcaagtcaaagcctgtgggaaagtgatggggagaatgagagaaactgaatgatctcaccagctaatccatccatggagatgctttgttcagaaatctcttagaattagaagtacaaacatagttagatctgagttgaatgcatctgatctataacttccatttgtttatggcacacattttatatcactgacaatttcttttttctctacaaggagaggcagtatagaatggtgtttaagagcacaaactcaggagttaaatctcctgggttccgtttccagatttaacttgctattaccatatttgtattgtatctcttgaatggtgaacagagaaaatatgatgtagtcaagaagttctctccttcctgagcacactgtcagattacacttccccacttcttcctaagtggggccatgtcattagttttcaccaataatgtaagagtagaaataaatgcatgatacctgaagcctcagatgcattgagagccagtgtactttgtctttgctcttgttcctgccttgtctagcatctggatgcagaagatctggatgcagtgaaagactcaaaggcctaaatgatggtggagtcacaatatgggaggagtctgcatccttgaatcatcacagggattaaagcctccaccctgatactgaactatatttgactgtacaataaacatttataataactcactgaaattttgcattatttcttacaacaactagcttttattatactactatgactgcacatcattcatgtgagcaaaatggtcactcttttaaacttcaaattaccttggtttaaaatagttttactcagtgtgtgttcctcttcaaaagagctttgataagcctcattacctataaatatttttctgtatagttccaaatgttaaaataacttagtagagatgcagatatttatagcagttaaatactgatttataaaaccacacaatactagtacaattgatggaaaaactcataaactaagtaaaatatattgaaactatctgccagaaaacctgcattttccatgatttgaatgggccacttcaatgaacagaacaaataaaatggctcttgtggccataactctcacaaagaaaattatttctgataacaataccatccttttctgtaaatgtatactacgctcaactaacaagggaatctttactttgctacatcattaccaaattggtaaataaatctaagtcttcatgtcaacatttcaagaagggctccctaaagcttgtaaattgtcaaagatatcagattttaaaggatatgaacctcttaaaaagtacttggatgaaatgttatgttcagaatctcaaatatgaattcattgtgttcttgtcagaagttacatcatcagggtcctgagctggtgctggttcagtcccaaggaaaagaggaaacttgtgtattactcagccctggcagatgagtagattcttctataaccttttcatcaccaaatgtctcaacgaatttaaaaactaaagattatttcttgatttggccaggttccttgtaatcttgacagtaagaagctcagaaaaatttcctttgctgtgcatcatgtatgctttactcaaaggccgaaaagacatagaatgcttcttctgaactttcatttaaccagcggaatttgtgagggtataatattcatatattttattgaggagatataagcaatatctcttaacatgtagtttttaattgactattaagatacacaatcttttaaaaatttcaaaatgactcaacccaaattatttagaatatgatttatttcaaaacatttttaaaattccttccttccacaattgtttattttgtctatccagttttgtaataaatgctatatatataaagatggttcctggcattaaacaacatctgcaaaacagtgagcaagaacaagatatttctagaggtaagtaaggtccactaaaacaacataaaatcatagttaataacatcataaagtcaatggctgattctatgttttaaaatcagacaaacaaaccaataaagatcacacctaaaacatgtgcaactgtatagcataaaggagttcagaatgagactcaaccaaattattgcgatcatgaatattacacatcctgagaaacaggaactgtcatagcagtcttgaccacatgttcacatactcaagttggataaaaggaaaagtccaaaatcttggcacaccaaggtaaaaaggtggatatatatttaattaacatttaaaacaaattttcccatttctccacaaagagctcattttttaaatcttaaggtttagtgaagaagagatttcaagcccactgcaaaatgaataacattcttttattatgctgttgatctccaaatatgcaaatgcctttttctttaaaaaaaatagtggtagtttgaaatcaggtagcatgatgcctccagctttgttctttttgtttagggttgtcttggctataaggagctcttttttggatccatataaaatttaaagcagagtttttttctaattctgtgaagaaagtcaatggtagcttcatggggatggcattgaatctatacattaccttgggcagtatggccattttcgcaatattgattcttcttatccatgagcatggttccatttgtgtcctctcttatttccttgagcagtggtttgtagttttccttgaagaggtccttcacatcccttgtaagttggattcctaggtattttattctctttgtggcaattgtgaatgggagttcactcatgatttggcactttgtttgtctattgctggtgtattagaatgcttgtgatttttgcacattgattttgtatcctgagactttgctgaagttgcttattaaggagattttgagctgagatgatggggttttctaaatatacaaacatgtcatctgcaaacagagaaaatttgacttcctctcttcctatttgaataccctatgtttctttctcttgcctgactgccctggccagaagttccaacactatattgaataagagtacaaggctacagtaacaaaaccagcttgatactgataccaaaacagatatatagaccaatggaacagaatggaggcctcagaaataacaccgcacatctacaaccatttgatctttgacaaacctgacaaaaacaagcaacggggaaaggattccctatttagtaaatggtgttgggaaaactggctagccatatgcagaaaactgaaactggatcccttccttataccttatacaaaaattaactcaagatggattaaagactgaaatgtaagacctaaaaccataaaaaccctacaagaaaacctaggcaacaccattcaggacataagcatgggcaaaaacttcataactaaaacactaaaagcaatggcaacaaatgccaaaattgacaaatgggatctaattaaactaaacagcttctgcatagcaaaataaactatcattagagtgaataggtaacctacagaatgggagaaaatttttgcaagctatccagctgacaaatagctaatatccagaatctacaaggaacttaaacaaatttacaagaaaaaaaaaacatcaaaaagtggatgaagaatatgaacagacacttctcaaaagaaggtatttatgtggccaacaaacatattttaaaaagctcatcatcactggtcattagaaaaatgcaaatcaacaccacaatgagataccatctcatgccagtcagaacagagatcattgaaaagtcagcaaacaacagatgctggagaggatgtggagaaataggatcgctcttaaactgtttttgggagtgtaaattagttcaaccattgtggaagacagtgtggcgattcctcaaggatctagagccagaaatatcatttgacccagcaatcccattactgggtatatacccaaaggattataaatcattctactataaagacacatgcacacgtatgtttattgcagcactgttcacaatagcaaagacttggaaccaacccaaatgatcatcaatgatagagtggataaagaaaatgtggcacatatacacaatggaatactatgaagtcataaaaagaattacttcatgtcctttccagggacatggatggagctggaaaccatcattctcaggaaactaacacagggacagaaaaccaaacactccgtgttctcactcataagtgggagttgaacaatgagaacacatggacacagggaggggaatatcacacacctgagcctgctgggggttggggggtaggggagggatagcattaggaaaaatacctaatgtagatgacaggttaatgggtgcagcaaaccaccatggcacacgtatacttatgtaacaaacctgcatgttctgcacatgtatccaagaacttaaagtataataattaaaaaagtggtaaaataaaatgaaaatcaaagtatttcttagctagtatatttcatattatgtgtaaggccatagcaaaataaatcagtatatcttggtggcaaatgatcaattgacaaagccttctagaatgagtcatctcaaaactggtaagaaggaagtcactcagtataagcagaaagggaatatggatttgacagagtattcaaactacaccgaagcttaaacaccactttactgttcattttatatacaatagatctgaactctaagaggcctgcaatcatttaaagttattgaattagtttatcaatagattttaagcattaatttggttgagtctcattctgaactccttcatgctatacagtttgcacatggatgatactcagatgaagtattctgattgacttttctacatttcacaaatcaaactcaaacaatatacaatcatcttgaatgaagtggtatgagattagtagcaaaaggctgaaagaatcagaaatgagttctaatactatgtcattgataaacaatggacattttaacttcaggatactaattttgaaaatggagacactacattctgttcaactattgggactataaagaaactagagtaagatcatgaaaatggtaaatatcataagttattatctccaattatcacaggaaagtttgcaattaaataccattttccttaaaagagtaagaatatatttcaactatgaaaagtttttttctatatatgtatttttttcttaaagtggaggtacaattacactacataaattagttgagaatgccacaccaaatattgtatatgcttttctcagggatgcataaaagtttattcttgggtgtgttctaacttcaaagagaattttgtctgaaatatatgggacatttttacatctcaagcatataggcaatcatcataaaaaagttatttagtttctagtattaactaaggctttatttgatagcttaatgatctttaaaataaaaacaaaacattgccattttctgttgatttagcctctcttctatgaaagtctccaagccccattatcacaccttctaactttttttttcttttttttttttttttgagacagagtttcactcttgttgcctaggctggagtgcaatggcgtgatcttggctcatggcaacctccacctcccaagttcaagcgattctcctgcctcagccttctgagtagctgggattacaggcatgcgccaccatggccggctaattttgtatttttagtagagacggggttttttccatgttggtcaggctggtctcaaactcccgactgcaggtgatccacctgccttggcctcacaaagtgctgggattacaggcatgagccaccacacccggcctacacctcctaacattttaaagtgttaacacaattcttttatttacaaaccttttattttgaaatacagaatcacagaaagttgtgaaaatgtaccagaaattcttgtgtgtccttcactcagtttctttctttgagacggagtctcactctgtggcccaggctggagtgcactggcgtgatctcagctcactataacctccgcctcccaggttcaagcttttctcctacctcagcctcctaggtagctgggattacaggcacatgccatcatgctcagctaattgttttttgttttttttttttttagtagagacggggtttcactatgttggccaggctgatctctaactcctgacctcaaatgatccacctgcctcagcctcccaaagttttgggaacacaggtgtgagccaccatgaccggcaatttcttacaatgataatatcctgtctagctatagtacaatatctaaattaggaaattgactttggtctagagattattccgacttcactggttttatatgtactcatttgtgtgtttgtatagttataggtagttttatcatatgtgtagatatatgtggccaccaccacagttaaaatacagaactgattccatcatcataaggatccctcttgctacctctctttggcttacacaacccctctccccactccatccttgagacttgtcaaatcaataatctattctccatctctataattttgccatttcaagaatgtcttctaactggaatcatatttatgtaacttcttctgttggactttttcattcagcatagttcccctgagatccatctaagttgttgtgtgtatcaatagtttattcctttttattgttgcatagtattccatggcataccatgtaatatgttatacactgtgcataacacattttaatacatgtattaacttaatacagtgttattaactctggaaacaaatttttgtttgtgtttcttcaaacatacagcttctaaaactgaaaatattggctaggaagacatatctaaattataaagaaccaattgttcatatgctatataaaaatgtttggagtaagagggcatactttcataaagtttttttttaagtcctaaaaagaggattttatctaaaatagaatgcagcttctaagttctaaaaatattatatatcctattgagtagctcagtttgtagctggaagaattgtgcctgtatcccagaaggtcttataaataatttattcaatttcagtatttaatttaattcatttacaaatgagatgaggttagattattcagtgtaataagaaatctgttagagaaaatagtatttttcatagttgattattatagtatcattttctttaaagcatgaaatgcatcttttaaaatattgattagagactataatgtaactttgctgtaattacaatacttgtcttccagatacgtcctgaaaatagttggattaaacaaattagtgaacatccattcaataaaatactatgtagcaatttataatgatgataaagatatacaatttaatgacatggggatatattccttagatgttagtaatttgcatagcaggttacaaaatagtttacataatataattatatttttgtaaaatgatacctatatatccacacaggcatacaaatcggaagaatatatacttttttttggggggggcggtgggggacagagtcctgccctgtcacccaggctagagtgtagtggtgcaatctctgctcactgcaacctcctcctcccaggttcaaatgattcttgtgcctcagcctcctgagtagctgggattacagacatgcaccaccactcccggctaatttttttgtattttttagtagagacaaggtttcgccatgttggccagactggtctcaaaatcttggcctcaagtcatccgctcccatcggcaggctgggattagaggtgctgggattacaggcgtgagccacccgccccacaggaagaatacgtaataattgtgtagtaaaatacatatttttaaaggggcattctgggctactgttgtgtatattactctttaaaccctttaaaatagtcttgaactcaatctgacaagattactgttctcatgtaagaacaatattttccttttactacagggtcaatattcttgcacaatagtattgcattcctttacttattcagctgtacctaattagttaacaagttcactttaattattttcataaaaataattccatttttgatgatccttccatatcctcatcatcaataaaagcagcagtcacatagcactgattaaagaaattacttcaaaattaaaactacaaaaataaaggcttcaatatcatagtttctctaaatgtatcaaattcagctgttaaatatatttagagcctacgagtgttctggtattgtcccactcacatcttatgatttctttttcctttactttttaccaaacaaagctgctgtgttatcatttaggcatttataatttattcctgcttcttattttacaacaactttcagtgatatttataaactgtggcatattagtgattgatattatgtataaccttgggtagacttctggcagggcttctcttctgctctctctcctgtcactactggcagcatatacaaattgttaaattgccctgagtaaagctttattgtgccactaatatctaattttcttttgaattaaaaactacctttcatatattaagcatcaggattagtacttcaaagatacccattataaaatttctcaattaataagatactcatagaaaaatggggtcaattattggcataattatattcttttaatattttatatccattaccattctgtggtcacaaaactatctcaaggacatactgtcttttaatttggaaaaaaaaaagttgagcaatttgaaagtggttgtatgaactacttacagaaaacaaacgtgaatcctacactgttgataatgactattacactactattactccttacagtaacagctaatgcttgtgtagtagtaattaccatcaattaccatctatctgttatgtaatttaactccttttgtcttaactacaaccctatgagttaagtgacttgcccaccaatttactggcttaccctttggtcatcagataggggaactacaactcagacccaggtggtctggttctgattacataatggtaaaatggttattacagaaatttatctgaatatggactactttgtgactaatattcacttgaattttgtgtccccaatgcttccttcatattcaatcttacccgtgcctatactaatcatcaacagtttagcttgagagctgcagcagttgactagttttccaacagctaaacagaagattctggctatttatatgagcattctcttaatgctttactatattatgaactgaccctaagggctaaatattatttacaaatccaagaatacaaattcataaattctagctatttttatgccaacgtggactgccaatttgctttgaattatattaaaagttcaaaaactttaaagttctttacccccccgattccccaacttcaaaacgtattagctgttacaattcatacatggactagcattctaaagatgtgacagttccctttgaaagataatgtttggaagtctcaagacttgaattccagtgtcatctttgctctatgatgctggataagttacttaaactctctgggttttatttaattcctctggaaatttaaacataatttttatgagaatggacttttctaagatatttttacaagaatctaagatgaattagagattcacttaatgatgactgtctgaaggaacatgcatgaactggtctaatttaaagagatttctttgagtgatctgtcatttttctctcctctttgttcaaattaaagaacaacaacagataacgttaagtatttttatacttcctaaaaacaactttaactgacagagtgaaaggtataaaacttcaccctgtaataaatttgaggccatctttagacagaacaaaattaatacggccctgtagatgaaagatttacacagatcgattttctgtgcccattgacagagcaactggataatctgtggtagtcttttacacttgagcagttaaaacctcagatatatcctggactgaagattggtcagcagttcttttctggtccatgaataattaaaatcattcttattctgtattctataaatatgcagagaatgcaagatttgaaccatatacattccgctggagaagctgcttgggtccaagcgaacctcatcagcgatcacttcaaagatcaattcttcatgtccacagcatcatgtttaaatgattgtgtgtgatccagctgcttcttgtctccttgttgcttcatgcatgatctttactcatgatctcacaaactatagtgcttcagtagtaattctgcattttgtgctaaattttaacagtgattgccattttataggctaataggctgttgttgtgcatatttattataacacttttttcttttcctatcaataacagtgctttgcttagataatgagaagcaataatctctttaaaatatttacaagtctattcatcatgggaaaaaataatcttacaaagacagccttctccactggcattgcttttgattgtcactctcctccctcttcccaagacaggcatttccataattgcatcttatctttttgtatagactgagaaactggcaataactatgcctgggcaactgttttttgaggaaacacacaaatactacctgataatgtgattatatgcaatgatctaacttgctcttacttttaggactattaataatattaatgattttaaaatataatattatcatagtttcttattctgattgtagagtgagaagaaagaaatgtaaaggtagaatataataatagtaatattgtctgtacttaattccttggatggcctttcttttttggtttgttttattttttattttttaattttattttaagttctggggtacatgcacaggatgtgcaggtttgttacatatgtaaacgtgtgccatggtgatttgctgcacctatcaacctatcaactaggtattaggcccaacatgcataaactatttttcctgatggtctccctacccctgaccacccccacaggtctcagggtgtgttgttccactccctatgtccatctgctgtcattgttcagctcccacttataagtgcatgttcttagatatactctcttactaatctgtgtagggtagattcactccctgaagtcactcatggggttctaatttctatagctgagaaatgccttttagatgcccttgttctatcatacaaaaacactgttacttattagaattccagaaaagtttcctaaacaccatcaaaaattgtatggcaaagaacatgtttgtacctcatcaaattttatttatgttttgattatctaatgtgctagtcatgtttgtgactttccacacgaaatgatttcccatgttttctttctaccatgcaccatccttatcattaaggaacacaaatacatttaatatcaatgcaatcagtgtagaagtgaggcaatatgacacagtataaaacaggcagatatacagttatatatttatcaacatgtcccatagataacatatatctatattccttcaactaaaaagatttgtttaatattgccatttattatcccatatttctattttaaaatgttttgcagccataaaaacaaatgagatcatgtcttttgcaggaatatggatggagctagaggccatttttctcagcaaactaatgcaggaacagaaaaccaaatactgcatgttctcacttattagtgggagctaaatgatgagaacttacgaacacaaagaaggaaacaacagacactgagatctatttgagggtggagggtgggaggaaggagtggagaaaaaagacaactgtcgggtactgggcttaacagcttggtgattaaatgatctgtccaagaaacccccatggcttgagcttacctatgtaacaaatcttcacatgtacccccaaacctaaaataaaagtttaaaaatatatcaaatgttgggataatatggacagagtctcctagcaaactttttttcagaaaattatagtccactttttgatgacggtgatttcaaaggaaactatacttgagttcagctgccaaatctttgtttttttttagatgcataacagttcaagtaccattctctcttattttgtcacctgggaaagaggtcaaaagcacagtgggacactttacggggaacctgagagtctaagaaccattcttacatgccattagcatatcaattgatcatgaacatttaaatttggtagttttaggaacttagtttccttttcctaaaatgaagactttggattagtctctgaagcaactttctgctcgaaatgttgatgaatccgaatcaccttttcattcacttgaaatgtaatgacgtttttgatgtctacgttacagagattgaagtaacgcatctttccccttttacactattatattttgtgatgttttgctttaaaaagttttattttttattaatcttcaaatttcatatttttatccttgataacttccttctagagatgaggccagtgataagcagtatcttaattctcttctgtaagtattttttccttttgcatatgttctcccattcagtacagatatcaatttagctatttctttattccagacacaattctcctctgagattttcatcaataaataaagagacatgctaatatcacagctacttgacacctaccaaaaccctcattaactagtggactacaacataagagaatgaacatattttttaaaggccttattgcaagtcaagtcacaaagttaatacttccacatgtatttgccactcttttccttcaacagaaaaagaaattccagttggttgtaaagtcaaatctcttgtcttttcagtttaaccagctgcactctaagtctcaagacaactccctccttattctatgtttaattgactaccttccctatgccattatccatctgcatctttatgaacataatcaaacctccaacccttcagatcatctgtggggcattgctatcaccaaatagcaatttaatgctgagctttatctttcctggggattttataaagccttgaaagaataaagaatctagcagttggcacactcacttgcatgcaaacttagattgttaggaaaagaaaaaaacatttagataattaaataggatcatttaatagttcactcatttcataggatgagtgaggcaccaggggaaaagtggattgtttgagataacacagctagccatgatcccatgtaggagaataagactgctctaatatttcactctagcaccatccctattacatcacacaacttcccacacttccttcgtattttcccatgataaattataccttctgatttttccccaacctctcgaatgcccataatgtaactgaagaaatatagttccttaaaagtagctatggtttctaaaggcaactcaatgatttttaaaatacaatacaaattgttttttaagtgtttgttttgctttccagcttcaagcagaaccatcgatgtgacaaccgaagacaccaaagaagcagtcctttattattcaagatgtcattaaagtgcagggatcctaaaaccccattctagattatcccttagtatggatcaggctaaaatatttgcttcatgtgaggccctaggtcttgaatattgcatggtttcttgtactctgcaaatttcttctgaagaacccccttgggtgagtgactgttgtcagtatttatattaatgaacttttggagcacaggtatatctccaaagaggaaaggcctaattttgtccccagagctacaaaggtgtatggcatggctgacactccccagtagctgcccaaggatagcatggtggcagatgcattatcagaacaaaaagccaagagtgcccagagctgaggacctgatcaagtgaaacaatcagtcctctctgtgctactttgcaaatggttcatatacttttcaattagcacctgtcatctggatgcaccaattttcgcagaaatattttgaaaggacaattttatttcacgttagctggatgaaaataaaaccaaattccttctagtcagaaatatgtttggaaagattgaatccaaaggttcatatatccatcattggctccagatttcattataatgactgcaggtcaaggattcctgcaaagattttttaaaaaaatagtattttagaaatcatattttgaaaccaggtttgcttctgtttagttaactcccagagaaatatactgtttttggaactcccaaccccaccccaccaaaatataatttgcttttaagaatgtaaaaggattatggtttacacaagaaactaaaacaaatataagaagaaagtgcatgtatgccaaagtaatcgctctctctcttactcattctctctttcttatacacacacacacacacacacacacacacacatgcacactgacattaataagtcagtaatgagtatattagtgtctctatttaagttttctggtggaaaccaaactcttaatgctattttaatgaaggatttgtcagtgaattgtttccaagagtggtaagggagcatgcaatcacatttttataatgtttggcatcattttggggtgtaggaacaagcagattaactaactgaatgatacaaaatggtccactcctcttttcttaaaaagacacattgctccctgcaaggctgcatgaaatacaatttattctttttggacaatttcataaaacaaaagtggaaaattcatcctagaaaatcagatatatagaacactacaattttattactatttctggacaaattttcctaacatccttgcagccttctattatgattcacaatgtctgcaatgagagattagatgacagagtaacctattaaggaacagttactatgctgctggatgcagctaataattcctttatttttcatttttattactttatagtttatgaatgtacaatctactcattacctattataaatattttgattcagcaatggaaatatacaccagtaaacaaaacctacttgaagctttatgtattacatacccacccataaatgtatatcatagcatttgctgcctactagacttatttcttgagaatctagatgaactcttaatcttagctgtaataactacctgcaaacttagtatcatctctgctgctttcactgttttatctactgtctggagtcataattaattggcctcattactgtttctactatgaaatacagtcttctaagacattaatattttatcagagatactagtcttgacctaaaacagagaagaataaaaacataattgtgagttggaaatttttttaacaataacataaaataatcgatgttttggcaagaattatgacaaggctgcagatagcgacacacagctcactgagtgtaaatggagagaactaaacaggctctcattggtgtaacccttctaaaactctctagctaacattcatgccaaaacatccaatatatcaaagactttgtagcaatctggaataaaatcatttggtttcctctagactgtttctgcaagaagtaaatataacccagatacaatgaatgaaatgaaattttagtgcactgagttatggttttcaaaagtaagagcaactttagaacactaaatttaaagtcattcctaagaaccttctggaacctatgaaaattgtattaggttggcaaaaccttctctcgtcttcctatttctttttttcatttttcttgttctttttatcagtcaatactaaataagaatgtgctgcccaaaaagtgaagctataaatcgacttctgaaaagcttccctttttctccatgggtctctatttcattaggtcttcttttattttacttctgttgcccactgtttaatttctgaggccagtattttaatatcctttcaagtattgttttcaagatgtattgtgtagcagatcagtaaacaaatagttatttgcctcttactctatccaaggcaccgtactaaatgctatgcagaggtgaaaagtatgcttactgctatgcaataaattacaatctaatgaggagcataaaaaacacaataataataaaatagttcaagtgattttcaaccttggttgaacgacggaatcacacatagagttctaaaaagacttgacactaagaccttacctcaaaatccattaaactagaaactactgttgtcaatgtttaaaaactgaatgatagggacaatagtatggttaggatccagtggaagatgttctaaatgagtactcgttgtaaatagcacatcaagtgtccctcaagggcaaggatccagtggagctttaaatctacgtaacatgagggaaagtaatgcattagtactgttctaaagttattcatggaattctctcttctgatagcttattatcttctgagttcatagtagatattccatatctcaatgaactggttttattaggaaaagaaggtgtactggttatctgttgctgaataataaattaccacaaaactaaatggcttaaaacaaccatacacacgcattatcctcactgtttttaagagttagtaattcaggggtacttaactaagcagttcaagctcatggtctcatgtgattgtcaccaagtttctgaccctggctatagacagccaaaggcttgagtagggctggaacattagcttccaaggtagtgcacttacagagctagcatcacattgttcttagtccattggttttgtatttctccttttccttacctgtatttaaaagttttccttaagttctattttccccactgtgatacctaggactatcaagtctacttttattcaatacattgttactgagtatctctcctaatcaagacattatgccttctgtctttccaagcttgaatacatcacaagttaaagggggaaacacatttgttcacatgcagctactatgcctactgtactgttttaatttaccataatggacaccacaaacaaagggctacagcaaacgaaaggaggaatgattagttacacaggagtggtgtataggaagaattaaaaaagtaagctggggctgggcgcggtggctcacgcctgtaatcccgccacttttggaggcagaggcaggaggatcacaaggtcaggagatcgaggccaccctggctaacacggtgaaaccccgtctctactaaaaatacaaaaaattagccgggtgtggtgctgggcacctgtagtcccagctactcgggagactaaggcaggagaattgcttgaacatgggaggtggagcttgcagtgagctgagatcatgctactacattccagcctgggcaacagagtgagaatccatctcacaaaaacaaaacaaaacaaaaaaaaaggaggcaatggacttgagcagtaatgataaatttgagttttgagaggcaagaaaaggaactattgacttaagcctcttttctgggaccactggtactttgttatcctgcctgacacttatagcaaaattaacatatgtctaggctaaataaacatattaaggaggagatgatatatgaatataaagtatattaggggaggcagaccaaatagcttcaacatttatagtaaaacaaaatacaacatcattggtagcaagtgagagaggagggtttgaaaattcttaagatgtgaaaatgcatgaattttacttggaactgatccacatttttttttgtttagacttttaaaataactctatagcaacattcaataacttgggattgtactggaaaaagtaaacagtgaaagggacacagaccagaaaattaaaaatggctagatgtcaatgggagaagaaattgaaggtcccagagagggcagcctggaaaacggtaaaaaagatctcctgaagtctgagagggtataatgaatggcaaaactgtgaagagcctggagaatcaaggtcgtactgcaggtgaagagctagcaaacctattgccaggtcttctgataactgaattaaagtcataattcagttcttggggtcaaagattgaaaactcagtatctttttagcctgaagtcaaagaggaatagctattttcctcaagttttacaaagctaacaacagcaaggtacattggtctaactttttcttaacaacctagtgtaggaaacaaactctgaaaaaccaacagtcaaatgagctctacagtttgtgacatgggtctttacattcttgaatgtgtttctgttattgctgaaccttatttttgtacaagggtccatgtttgaagcatttgaaagatttgaaatgttggaattccatttttagctgacttttttatatactgagttttctaggcattactttggacaacaggttaatgcttgccttgctctctttggatgctgtctactccacacaggtataatcatacatacatttctatctagacatcatgaagattccacttctgattcacaagagctatcacaatgttgtacaagtccatattcttaggataaaaaggttaactctgtgtctcagctttgtgggcagaagaaaagagaagacatatgccctattatttgtgttatattacatgcattatattttcgaaatggcatttcaaagaaatagctacaaaatcaatagttcttttcttcttcatttttttcttagagctgaaaactgttcaacagctttatcgtattaaattaggctttcttaatcttaagcagtgactgggtgagttttcctggggaaaaacaattctgaattccacagtgtttaggaaataatacaatccaaatctgagagaaaaatttaacgccaatactgtgtaaatatttcacaaaatatttgttctcaaatattcaactttctatgtatacattatacagttttgactcaaagatcactaaaatgaacctaaaataaacccaccatggaatagtaacttccaataatcagtctttcgccttaagtgaataaggatcacaataacataaaatgcagaggctataaagtaaaaagcagcactcaaattgtagagctgggataatacaactaggtgaagttaaaatttgaaagaaataaatgggttggttttgagtgatggtactgcccatgattttttactttaaattttttgtcactattaacaaaaaataaagttatttgaaataaaaatataagaaataccgtgtgtgtgtgtgtgtgtgtgtgtgtgtgtgtatgtttgtatgtaagacatagaggaaaagacctaaaagatacaaaatgctaccttccaattcaactgtagctattggctctgtcagttttagccttccaagttgtttatttccatgagctcagacaaattataccactgactcatgtgctgctccctgggtgcagtgagaatattaacctttagaaggggccttaaaaatgagaagtgttatatgaattgatattttagttgtgtgttgtgtataaacttttctggatatggcttgccatttggttgggtgcttatttttggccactcaatgtgcataccaatgtgtgtgacttcatatatgggaataaatgttggcatttggattatttttggccaaagagtgggtgagaaattagacacactcaggagccaaaaataaccaaatggcaagccaattacataaatgttttctggcataccaaaaaaaatctggattagttatcataaaacaagagttttagttccagttattattactattactactactattacttctggtgttattcctactaaagccactaatctctattagacacttatgcttgttaaatttataaagtttaacatgaatcattccatttacaccaaacactaatcctatatatgaagtgaatatcagtactataaatacatggatatcagtcccacacaaagacaagaaaaattatgcttagaaaggttaagcatcttagtagagtcacacacaaataagtgacagagttgatgagaacccagacatactgaaattaagaatcagacaattcatctgcatggaaattctgctactaatatatcatgtggccttgagcactcatgaaaaactttgcattttagttttatcatctgaaaaatgaaaatgagtatatgtgctgtagaacatgagtgtaagtgctataaaagtagaaactgatggaatgtgtaaagtggatgattactgaaatattttccctttcctataaacctaatagatcatttattcttgcatctgagaaaaaaatactaatgatcaacagaagactacatgaaggcagtaactctaatattttcacggtattcttcaaagtttgaatatacattatagttcatttgaattctttcaagaatgccaagaaataggaccttcaaagtgcaacatacggaatatatgttataaaattctatgttgtataagtcacacagatgtggagaatggaagaaaactggacatcaagcagctaagcactttccacacaaaatcttgtacatgattgcttataatagcattactcatgattaccaaaaggtggaaataacccaaatatccatgaattgatgaatggataaataattgcagtatattcatacaatggaatattattcagtatttaaaataaatgaaatactgatacatgttacaacatggatgaaccttgaaaacactatacaaatgaaaaaagcctagtcacaaaagatcacgtattatattattctatttatatgacatgtccagaattagcaaaggaatatggagaaaaagtagtagttgtctagggcttgggagaaggagagagaagggatgtctttcagggggttccaaatttgattatggtgatggttgcacaactccgtgaatatactaaaaatcattaaattgtacacattgagtaaatcacattgtgtatgaattatatcctcataaaacaaatgaaaagttcaccaccacctcccaaagaaatactagaaaacttatttatttgcaaaattttcaactgcaaaaattatatgtgtgaattcattaaacacttatacagtacaataagttatacatgcatacacacaaatacacacacacacacacacacacacacacacacacaacaatttttttcctaactagacattttgaaaaccagttttaggacaggttgttgtaaacaaaagtattcacgaggtggtcagaccaatttgaaattatccaattggcattttcaccatgtctcatgcaaatgtatgtcagaagataataagatctcagaggacatttttttctttctagtcagctgcatctacccaggcttaatttcaatctattgctcctcattatatccctttggagagcctaattccattccccacttgatggccataccctctgtctaaacctgagcatcagtataccacatcctctgcagtaatcacacctcgggacagcacattaaaaattacctggaactcccaaggagctgacattatggaccctcaggttgacaatctgaaacaatgtctggaaggttttgttttgttttgttttcagctttgctctactattgaagtaatgtttgaaaacgtcatttgttaaaatgttaacaaagcaaagttatatataacatatatagtatatatttaattacatatgcaaatgtaatatatattttatttattatgaattacacaaacaatgtgtgtgtatatacacacacacacagaaatgggcagtacacacacacacacacacacacatacatatacacacacatacaaacccagtgaatccgaatctgagtactgcccattttaatatcatgtcataatattgaaattaatatactaagtgtacattaggttaaaaacagctgctcttctagcactcttcttcaagaaaaaatacatagaagaaattcataaaagtatgttagatgctaaaatctaaaattcagcagggacttaccgatggggtataaacaagattaatcaatacgatgtgctagatttcaggagaggtaagacacattcaccaaactatcttcacattttatctacctgatttaaaatacaaaatctttccatgttagaacaggtgtatgaatttactaagagtataagtagaaactgctattaaattgctgtggaaatacttttcatatttacctaccttgtcacaagatgaattttttaaaagaatacctctgtaactcacctcttgaataatcccttgtggtcacaatggaaaaaatatttttttattttgatacttactgatacatgttatgccttattatagtaacttaatatatacaattaagaaatatatatttatatatcttccccttaatcttcttaaaggaatttggtattattaatctactcttaccaataaggaaacagaaggttgcagatgttagataatttgcttatgattccgtagctactatgtgacggaacttgactttgaatcaaatattatacttcaaaggccatctatgttctttcaagcatagcagttgcctccacaaaagcattctgatcattgaagagtctaaactcaagaaacaaaatatgatcggctttagttcttctaataattgttctaatccatactattctgaatcagctatcatttgggaaagttctcttaatatcttggcccaaagtttacagctttttggccatttcaaatctcttccctgctattcagtaccacaagttagggcctttgttgtttccatgtagagtaggagggacacaagcctaggttggtatatggtttgaagacctgcttttcccctttcttctaggcccagcctcttcttagcccttgggtgaagaagaggagaaaaaggcaaaccttcccttcctggacttggtgagctgctgtgctccactagttagttgtggctggcttacagcctgcaacggttggcaggagaacccactgtctggtgtccaaatgatggtgttctgaaatgcactgctcatttccctccagtggaagactgaatttccactcaaccacttttgcaccttctcagccagtaactcacactaccagggtaccctcatccagtgggcagacctcttatgtactagcacaatgaactcatgcccagcaactttctgagatgtccaatgtatcaatgagagatacagacatcttcatctcacaaacagtgagtgtacaggttactgcaatgctgctacccttttgtcagccctttactgaccaagcaggtatcaaatgaaggaaatacagttccggtctccctcctctgaccattcttgcaaatctttgtaaatctttctcacagggtatccctttccagttttgaaaaggggatatagcttttcttccagcatatgacattcactaaaatgctatttgctccatttctcggattattttgatttagagaggaggtggtggtggagggtcttggctcctgtccatgagcctgcaggggctgtactccaccctgcttcccagaagctcttagaaaatgcaggtcctgaatatccactgtcctcagtttggggtctgagctaacattcagggacaacaagcaaaagctcatcccatttaattacacttgaaaataacacgagtcctttaagttgtagcccaaattttaaaaaatcaagctatctttcaaaacgtgctaacattcttgcgttaacacatttgatgttaaaacatttgggtcttgttcattgtctctttgaataagctttaatagatatttctcacacaaactacatataatatagagactgtatgtaatttccatttcatatttgcagcaaatgtgacattttcctttattgcacacctcttatttcttcattctcaactctttgaactctgaaagcccaagccttaagtcaaaaaagtatgagaatccatgtccacactttaaaaaggaccaagaacacaaggttgtgaactactctaaacactgaaagaacaatttaagtatttctatagccttcacccctggagtactccacttctttgataaagtgactatttttgcaaaaagtctagtgaagttcatgagtttcacttctctcaggttgagagaatgagttaacttggactctagcgttcattataaacactagagatttaatatatggccaaatgccagagagtctaattcaaggcattaacataaaataataacagttaccatttatgcaatacttgtggtgcactagcactatgctaggcccttcacaggcctagtttcaggattacagtctaactccatgacgtgggtagtattggagccttcattttacaaacgagaagactgaggttgaggaattaagtagcccaaaactgtaaaggtggaaataattggggccaaaattcaagtttatcagttcaaaatagtttttgaaaatctaccatatccatggcataggtacttaaataaaacaaacaaaattataccctttgagaatttctatttggttctgtcacaacacagtgcctacattcttacaactaaagtatgtatgtaaataagacatgtttcaataaaaacatggaaaacatttaacagatatctgatttattttcattaaacaaataatagatataacttggtgttttcaaattatttacacttgttgcaataaaaaataaaatgagaaatgtcatagatttaaatctcagttgtacttaaagcctctgcaataattcactttgtaaccactgtatatatttattaatgaagtattaaaaaataattgtgctatactatatatgtactgttctatgtattaacgataatgctgtattagtgatcttattaatgctgtttatctctcaactctctaacagtatattttccattcaaaaccaaaattataattacttgggtaaatattatcatttacaggcaaataataagaatttgaagaaaatcaaaacagaattggtccagtcaagcccaggcaatgagacccaatcacaaattcgtgcataaacttttgcctaaagaatagccttgttttgttttctccttgtatccaatcttaaaagtgttttaatgaagatttgaatattaagaattcattataaaaataacaactcatcatcgcactgtgtttggtttattcaaaaaactctaaagttattaatttcagcttcctaattagaataatccaattttaatctactggcatttttggagatgaatggattggtggtgcattattctaaaagttaaatctcattaatatttaattgcacccacattcacaggtattaattagaagtgttttatgagtcatagctattattggaaaatcaggtacaattttataattagcataaaatgaactgtaattttgaataatcactgatagtgatcatttagtagaccttgtgagattattaaacttgttgatccatataataatttatatgtagactgcatatcaccattatagtgatacttttgagacaattaaaaataacattccctttcagccaagcaggaacacatatttcattgttgttttgactatgaataaaaaccctttctgctgaatacattttaaagcagtagtagaaaatagataatgtactagttatgaaattgaataaagcacaatcaaaactataattttattgatatttatatattattatatgtttatatcaagatctttcaaataaaagatatatttagcttttaaaaaataaaattactttcacatacataagacttgcactttgctcaaacacacactatttaagtggtttaatcaagtctaaataatggatagttactagaaattcccaaacaacaaaatgacacagtgatatataagttaagttctattaaagagaaagcttttgaataatctctatccatttttctggctttcataataaaatgtggacataccaaactgacttgaaaaaaatttaaaagtggccactagattcaagggaaactttattttaggagaaaacttgttgagggaagttcctcttataccttatgtaagaaagcccaatataagaattaaccataggaactgctgaaaaacctccccttaaatgggtagatgggttcagtgaaaaacacacatgcacacatacatatacacatatacatatgttatatttatatcattttgatatcatgcttagagtatctgtatcctaaatttaatagaacattgaaaataagaatccaaaatagtacttaataatcaactatttcttcttaagatgaaaatattcatagtccctaaaagatgattaaattcctatatcaacagactattaatttgaattataaaccttgtaattttcatattaaatgataataagacaaatataatatgcctgtgatttccattataacagcaaaagaaatgtgacgattcaataatcaaatattttcatatatactggagtctataaagcatttcatataggtaaacttgaatgaaacctaatattatatactaaatactaaggaaatatcgtcataatgaaggttaaagtttagagataactaaaaacaacagtatagtatattctgtaggcaaatgtttaatgtatcaattatacatattacactcttggttataaatactaaatatctcttagtcaaccagactccatttgatgtgtaataattttgcctcatcaagaagaagacagggtaaaaaaagaacaggaaatacgtgttcttcgttcatttaatacatataattgacaatttcaggaatatgctgtaatgtactctacacaaatcttgcatttcctttggctcattcatgggagcaaatcaatatgaattcctaatacatcttaagagctacactagacagaaaatttttgcttattggcaaactaaatccactatatattcactattaaagtttcctgtccttaaaactgtcccctcaggatttaatttaaaagcatgggattcactgaatatgaagtatatttttccaaatttataattgaaaaacaaagtttgtgagtcatcttttttcagttttaaattctactaacttctttataaatgtcacagaaactctcagaagtagaaaatcaacaagataagcagtttcatggtagtgaaaaaaatatgctttgaatttgcaaaaaaaaaaaaaaaatgggtttgcctagaaaagatatcaacactttaattccacagattatttcacccattaagttagcattccctcttcacctatatggctaatattaaaggcctgtgtgtgaccctacaacttaagtcttgtaagagcatcgatttgagtctggttttttttttctctcttctatacacagcctccaggaaagtccccaaacttagaagtttttgataaataactgttaactgaataaatggcaaagtttgtcatttatatgtttatttaaatctgtagcctcaaaattggtaaaagaagttgaaggtggtttgggacattacagttcctttatctgagtgaacgaggcagaggaggagcattcttaggaaacaaataaaccaaaaatattactcaggtcagcttgaaagaaaaaccaagggaaaggaataagatgcctttgtcaatcacacacagcccctttaacctttcacagtttgcttgcattatatgaaacttcaaggttaaatgcaagacaaatgtgaactgatatttctgcaagggtcaggtaggtaccagttgcaagtcattatgattgcaaagtggttcttcatcatgagaatttccaaactgcaagaatatgcctgcaggctttagtatgggaaacactcattaaagtagtaataaaaatatcacctttgaaattgtttcccagtttctaattcccctaagatgtgttctgtctttataattgctcatagaaattaacattggtaccatggcagacaggagctggttgttgtctttgacattaggagggtgctgcacattctggagatcccaagagctttaatttgagaaacagtggtcaagtgaacgaggtgagataatatctttattcattcaacaaatataaaatgaacatttacaataagctaggcacggttttaggtgctggatatacagaagtgaaccagacagacataataagttcctcacttatacagtttgcattctaatgatactttaaatattgaatacattttatagaatgaaggaataaaagctatgtgactaaggatataagaaaagacaggaaagaaaaaattgggatgaatatattgtttgtaaaaacaatggcactatggattgtatgtgaacttcagcttgtgaatttctgctataattgattttcctatacaacataatagaatgataagactgtataatggatctggaagtttcgttagtccaggcagccctctgatgcttaatctttccacactctacacaaaggaacttgtaatactcatgacctcttgaggtagcccattccatttctaacccaccgaaatttttaggtatttctagtcaattaattatcatgcctcctcgagtcattagctagtggttcaaagaatcttgtttggactcctaaccaagaattctaatcacttttaatttctttgatgattttataatttaacttggtttcaacttttttcatcaacttcttgttcaactctgaaggtattccatttaaaaagtgtgacaagcagagcactccacaaaccccagcagagtcaccactgcagctaagaggaattcaccacatccatctttctaaatattaatgcatcctaaaattgattagttttacttggcaacttcgtaaaactattgacttacattaagtttatgctgattactaaattgtaacagtttatttagttgttgtttattttgtgctttacttaaatgtgtccctcagttttagagttgtcagtcttatgttcttggatttgatacttcattctagcttgggatactcatattagtcataactttgattttcagcttatctacatactgagtaacaatatcttcttttattttaattcaagatattggataattttcatcaggccagggcaaggataaagccctgtaggaagaactagcaatctcactctgtgatcacaattcctgaacatatccagtaattgtccctaaatgggaaagtctttagcatacgtctttctctttttcaagtagattgcataaaatatgtatcagcaaatctctaatgctaaatattttcggttccttctaatccaatcagcaactctatattccatactttcagcatttaatgagtaaattaccaaataatttgggtcatttttgtccaggtagagactgatgtcaacattagtatgactaatgtaagcaacagaaacaatattaattccagcaggcacagaaaaaaatctactgcctagttataaaacagaattttaagataattcaaatatagtctgtattctagctactttcaactcttaaatagagagcttgacttctgatttttctaaggagtttactgataatttctctctagatttcatgcagaagtcataacatatcctacattttattttttaagtgactataagataatgaaactgctttcttgtatgatttttggaaaccacatagctctgtattgcaccatgatgacttcaatgtttcaaagtacattcacatcctgtttcattcgatcttcagaataattctataaggtggataggaaagtattattatctcgactttataaactgatgcagggtaaaataaaatatgtagcatctctaggactcagctcactttaatatagctaggtccctgatttgcagccacattattacctgaattgtacatatcacagaaatgagacagatggcggcaaccctcacaaaattcattttagataatatgttatttatctaattaccttcctattcctctgagagttgaattattttatctgatacagacttcctttacgttttcttataatggcattaatgcccctttacattccacctccattctaatcctactcccattctcctgattaatgtgctcctgtctttcttgtattgcattaaaagaaaaaggttattataaggctctgaaggtaaagaatgttacatccttattacacccctggggcacattttaaaataaaggcctattataaataaatactatatgttatgtgtcagtgcgattcttaaagctcaacaaatgaatccaattcatattaacatgacctgctaccaagtataaatattacagcttcctgtgtctaacattgtctcaatcaaatattactgggtgaaaacatttaatttataaataaaaatacagtaaaaaagtaatgagattgaaatcagaaaacctaaactctgatcattgcttatccttttattagtcatgccatttatccacaggccttaattttcttattcatgaaatatgcacagtaaaaagaatttctgtaccttttgaagttgttttaaaaagattatgtgtataatgctattaactttaaaacaatatttaaaataagacatcatgatattaataataatattaaaaaatcaggacaatctaaattaaggaattattgttaaatagtcaaacttctgcagagcaggcaattatttttatccattcttcagctcaacaacatgtatctcatgctttgcccaaccatatagccttatgcaaagtgaattctccaaagaaaatttaagcaagtacataattggcatttttcagctgatttcacaactgaatgtggttaaacctcatattcagttggtgacattggttaaatatttcaaggaactaaatatgcttataagtagataaagaatggagggagtgaagcaaagaaaagatggtgtcagaaaagttatttttaaaatactttgggcctgatacagtggctcatgtctgtaatcctaacacttagggaggctgaggcaggaagaatgctggatgccaggagtttgaggctgcagtgagctatgatcccaccacggcaccccagcctgggtgacagagcagaactccatctcaaaaataaataattaaattaaattaaatacttcagtgtcaaatgagttaattatctcaaatgtttataaacatcttaatgtttataattttaagatacttgttattgttttttcaaacttaatgctctactttgaaagagcaacacagtatgagaagaagggttcaatttaagatatttgattttgaagttgaatgaggatactgtatttaaaggcattgagccatacctctgaagtatttaccaatcggattttgaaaacagaattattacttcctttgaaccacttttaattttcattacaccaaatgaagagattctacaagatctacatttttcaaataatggaagtgagcagagactgagacatgccaacagatagagttttttctttcttatttttctgttttcaagccattatttaaaaaaaaaatcagagtgctttattgagcttagaaagacacagccttagggaacaaaatgactacactaattttctgcatatgctagttgggtggaaagttcaacacaagttttaatgatcaatgatgccacgttagcacactttcaaaaagtggatttcagatttgggtgtgattccaaacatgcacctgccatcctcaaagcagagaattcaggtccagaataatcacaagttctaaattatacacagtgtgttgtgaaatatcattattatttttagaaagtgaaaaaatatctgtgatagaacctatttaatgttttgtcagcctccacagatgtggctaaaaacagcttcccagtaatactttcaagggtcaaaagcaatgaccttgtcatgtttctgtgatcgtggtaaaacacctgggtcaagacactagtgaagattaataaggtaattataaaggaatcagaaatgttattgtagcaaagcagatgtagcaaaaacagcacctcctaatactattggtattgtcctcaacttttttcccaatccttgattatgaggaccaaaataaatatgttttacataataaaatttgctattattaagaataacaaagactatttaaaaagcagtagacttattctcaatcacatctttaaaaatcacctttgaacaggatgttcaacatgcatatcagagctgtgggagaatataaagcatgaccccatataccattgttattgctgtatctgtgcccattgacagttgagaaactaagtgattagaaaagacaaagcttaaaaaaacgtaaacttattggaccttcttttatctggctggatctataattacatgctttaaaactctctaggtatgtagttttttttaaaccctataagtaggggttcaactttcaatttagatcatgtttcagaaatgcctaaagagatggacagaccgaattataacaggggacctaaagaaacagtcctaggaaagcgtgcattctgtgggtctgtggagcaagtctgtcaacagaacgcctggttgaaggtcatctttccaacccagagtcctatgcagaaagaaacttaacagcaaagctttagactcttacttgaagtctctctgcagtatgacatcacttgcatacttattaaaatatttttgccacttctcttttcatctaacttattgttattgaaaaactagataagatatttcccatttagccattcatccagaaaacatttactgatgcctagtaatggctatgttaaaaggcacataattagccagacacaccatgttgtatctcaatttagctcattatttctgatggcctcctttgttttcttctgtttggcacactcctctcccatacatacctgaactacctcctctgcaaaggtgctcctgaggcatcaaggcaaaattcactcttctttcttatatgctactattataaatttcagtgcttccattattgtctttacatcattttattaaaattatttcttcaaaagtcttaatggagagttttcactattcaagtttattgaagcatatgcaatatctcatccacatttctatcccaagaagctaacaaggttctgttcactttaaagccctcaagaagtgattcatgaatgaacgaaaaactttccaccttcagtgggaattgggtgacagttagctcccagacacgtttttgaagagatctaccagctcttagtatgaataccatcctttctgacaaatggtgatgattctctcaaaatggaagaatatctctcacattctactggagatttgaatgtgttctccttaaagttagcaccttctttttttttttttttttctttctcagaatctaaacgtctttggtaaacttcatatttagccacagtgattatagccccctccccaccacatacccacggttttggagaaaaataagtttgtttatcttggagtctaagacagaatctaaactttcagcaaggccatagcttatataacagcattactcatttacttttttaaattagagtatctttagtctttgattaggggttggaatacaagtgagcctctaagggaaataactgcctttccaggtcctgaaacttatctgagatagaaaaacttcaactttgtacccagtgacattttagttaaatataatttaagattctatggattcctgttatacatatgcaaaacaaagtaaaggtgtcctttccaaaaatattcacttttattccatattgtttaaatagttttcaagagagatattccaatagcctttatttttttttcttctctattgccaatggatttaaatgtttgcttcattgtggcattccaaacacacaaaactccagtggctatgggttttattcctttgagtgaatagttatcgtacttcaaagactgctttggattttaagttagggtgacctgttttcattatattcaaacaggctttgatccatttctcaattaggtattgcagatgacaaacaggtacgtctagctttcctgccatctaaattaccctagaattctatgaagatgataatttgttctgtgagtacactacttctatgtgttatccacacaaatttcattatttcaagtattgtctttttatgtatctcttttgtggggagactaatattccaatacaaaactgtgttctgttttggggaaaaaaaaaaaaagagctcttagacagtcagaacatgagaagtttaccaaaaataatttgtcctcaagtctagttgataaaaaggccctatgaggttagatttatacaattttattggcaatgacaaaatctagaataaaatatataattattgaggtacttacatttttagtataaactggaataacaaacacatcaactttacaaacctctcatactagtgtctcactttaaagatattcttaggtcaaatacagtggctcactcctgtagctgcaacattttgggaggccaaggcaggaggatcgcttgagcccaggagttagagaccaacctgggcaacatggtgagaccccatctctacaaaaaattcaaaaaattagttgggcatggtggcacatgcctgcagtcccagatacttgagaggctaaggcgagaagattgcttgagcctcgggagtgtcgaggcttcagtgagctataaccacactactgtactctaatgagaccttgtgactatatatacatatatatacacacacatatatatataaaatctctctctatattatatatattatatattatatatataatatatatattatatatatataatatatatattatatataatatatattatataatatattatatatatatataaagaaaatattcctaaataagtggctctcatatgagccacaatttaaggaatattttcttaaaggcagacttagagagaaatatgagtcacactaacacaaagcataatcagcctaactcctcagtcaaacaccctgaggttcacattaccaaagagagaggtttgaacatgagggaaacatattattttcactatactgtgatggaaggaaattaattctggttgtgcaaacctagagcatttctctgaattctctgaactagggtggattgttaagaccaagacagagtgtgcataataaccttgatgttgggaaaagactatgccgtgagtcttaaaacagatcctagttgatgattatgccaaccctgctgaagaaattctgaaaagatgcagaatgccttgaaatacaaatgctttttctggcccagataattgatattgcattagaacattccatgggatttgaaccagcctctttcacactttagatttcaggctagtataattccctcaccacacaaggcagaaccgaaatccctgaagttcaacaggacgtatccaatttcaacaactttacaattttcaatatctgtacaggatttttgcaaaaacccatttcaaatatcccattatcagttccacgtctttttgtgaataccaaaatatattagctagaccgtcatcttattttagctttagaatgtatatcagattttttttccagacacaagcaattaaaggattggaaaatagctcatggaaagctccaaagaattgatcctcagagagcaaatcttgtaacaccaaacaaccacaattcccctaagccactctgctgacaaaagttattgctagttatgcaaggtaactagaagatatgcacacaaatcattgcaattaaatatcctgcccaccatataactgatacttgccgagcagatggttggcagaattttcttgctaatctcgtgttatcaatgtccatattgcagagcatccttgaaggtgctcctctgtttgttttgtattggatacacctatttgtattgttgtatagttatctgtgctgtgtgtcttacccagtctcacccagttattttactttagaatctcatgggctgtgtatcgtgaagacaaacaacctgttggaaataaacaacaaagaactgaatccctcttatctgttcgctgcctaacaaatcaaaacacactgaaatctgggattattagagaagttttggggatatagaaataaaataaaaaccagcttgtcaaatggggctgcctgctgctcagtaccatgtgttaccacagcaagttgcatctgttcagctattaaacctgttagtgaatataatatagacagccacggcattaacaaatattcttaatgcctattaaactctacagctacacattttaatttttacattgtattagtaaaattcaagactatagcacctttaggacaatttaaaagtgcaatgaaaaaactataattttggttatatctcacatgcttaaattatatttagccatcattttaagaattggccatttaaaaaaaagttctttaatttttaaatgtggttctcactgctaactgtaatttagctcactatagatgcaataggactgaagtaattaatcacatgtagaatttgaaaaactcaactaggtacatcttttttccactactgaacatcttacttcctttcgatttaatattggctattagcaaatgccacagaacatatgagttactcccttgatataatccaccctctgagctcaggctcaggaacttcgtcatttaaattggctatcaacagctaggacatgtatgttttactaaacactttatagcagaatacatctgttgctactctgtttgttatattaagattaagcacaatgatgttgacagtattaatacatttaaaagcctgtcacgttccatggtgttcacgagtcctggggactgcaggattgaaataaaaagtgactagaggcaaaattaagaattatggaatgtgtagaaggtgaagaacacagaggtagactctgaaatgagtactgctacccaggaggatattaacctcttgcctgcctggcttttcccataatattgtgaagccacattttactgaaaagagccgcatgcttcatgaaatagttatccaacctccttggcctactgctgcttcatgaatgctgccagaataggggaaagtttgtgactgaagttaaaggggggttggtttcaccgctatactagtgtaattattaaaatgcgaacacactcaaattaaatacaccagaaagaaaatcattctatggagctcagtttcctaagaaataatgagaccaatttgcttttatatgaaaacactccagtttgtgatatcttcatacactgctggtgggagtgttcaacagtacaatgttcttagaggacaactcagcaatatatacattggttcggcttgtatgaatttgtacataaaaatatgcttttacacatgtgaaacgatatttttacaagattttaaaatgttatccatttgtaatacttaaaatgctgaaaaaattaaaatacccatcattagggtctgctaccctcataacatgtagcagatgcatgttatgaggtaaatatgagatcatatgctctaaaatgaaaagatgtacaaaatatattaaataaaaatactcaagttgcagaatagtatgcacatgataatatttcatctttttaaagaatgttcaggtatgttagcatatatacaaatccttgtacctatactatacacaaaaaagaaattgaatgtatatgcataagattaaagattagagttttagacaccacagtaaaaaagtgggtatattatatgctgtttttactttttactcccatcattgttgtattatttaaatttttcaatacaaatttttatgatttaaaaattaaattgatttaaaatatgggctttcctgaaaagtaaatactttcatccgtaggcaacaaataaaattcaattccttctgaacagcctgtcataaaatattattggccttcaagaccctacagtatgcctcactagtctattgaatctagtttatgtctggatgcttagaagaataccaaaaaattagtaagttaaaaaaaaagttaaataatataaatacagtctactgagaaggacaaagttaaggaaaaactagttaaatatggagttgatggttatagcatgttcctcacataacaattaacaatatctacatagcactctcaaattccagaaacatccccagccactgcatttatccaacacccttctcaataaccagttacaaataatcaaataaccatcggtcttgatttaggtatttggaggcggagctagaatttacaactttttcttcccaccttatgaaatatctttgcaatacctgttttttaaagatcaaatgaacacagttctggagcctagacgagtagctgtctaaccttactctgcgtaatagggctaaaatttcaactctatttctctgctgatgctctatgggatttggagcccccaaagcctgattttattcctaattaacagtaatgaacagatgacatacttttcctttgaacacctctgtcgggaaaatgtccaatcagcaagagctacaagcaatagacaaattccctttctctgacctcatttacatgcttaagtacacagagactccccctgcctttagtttggggtgcggggggaaagaagtaggtcaagacattgaggctttatgcattacctttagaatgtggtgaaggctgaaagtcatggctccaaccagagtttccagagcaatgtgggttactttcatattcatcacacataaggccaataccctcctagcagtattagtttagttctacatttaggcacaactcacaaagcagcaaagatacctataattgtacccattaagagacttataatagaaaatactatgtgctatgtcatcacactttgttgttatttagtgcattcaccttgagggtcacagaatctctggaattccatgtttaaggaatatcataaaataatacactacaaagactcactggtttcacatcagtagttgggattttataatcatttgcaaaataagctgggccagcctgaaattttcctttgtacaaagaaaaatgaagctttgaagtcatatacaactggttcaaagacaggcagttatttactatctgtatgattttggtcaatttatttataatgcagtctgctcattggtaaaactgagataaaattcatacctcaatgaattattgtgaatatttaataaaatctaattttatgcaaaatgtttagatcagtgtgtgttccacagtaagcaatcagtacactctaaagagtattgtttagttaccgttcttctgactaagccaaataatagggtaagcatgatttcagagggggaatttaaccctacttcagatgattcactgatagtacttccaaacatttaatatatattaattaaaataatttttacaactcaacaaatggagaaccaattttacctccctcagctaagccaagtgttagaggttggcacagcagaagattaaagagagagagagagggagaaagagagagagagagagagagagagagagagagagagagagaatggttaaattgccagggtagtggagattgatcatctctacattcctaatcaattagggaggattactacaggacagttttttgtttgttttcattctcctagtggattcttctcttctcatcaagtcaggatgcagggaaatatatcacataagtttttgtgtagatattagaaataaaaatgatacagagaacagacaagaagcatacctagactcagagaaatgatcacctgtgtgtagtatttgaatctgaaggtggagctagccattaacaaaagaaaagtcttcctttcataagaaaataacacaggaaaaatgaatccatttcatgacaggcctcagtcctcaggcctctgacttttgtttgcctcaggaggttgtaaatgggaagtcccaggagaacatcacgtgctttcacgattatcctttggtactgtacctcatactatgctccaaggagagcacttctggagtgagcgcctgcatgacaatggaaaactaccagcaggagggcaagagaggccacagtcaaaagtaaagcagcaagagttcacttatttctccattcactcaggtatgcattgcttcctctgtaaaccattactatgcatctactaagcaccatgctagagtatgaaaatacggacatgtaaagatacatagtattatacattgtcagtgaccctgaagagtttacaatttaatgggctacaaggacatataaagacatagttataactacagtaagtaacacaataggattaagaacaaagtattatgattgtaccaagaagggcataattagtcttgccctaggggacaaaggaaggtttcacaaatacataaaatatataatccaggcctcaaagatgaataaaaaagcaccagactaggaaaaagagaaggacaggtaggaataagaggaagtaggagtactttaaagaaaggaacagatatgaacagcggcactctggaggtctctttttgctgactctcattattggtacatttttttaaactgtgtttctcggtctttaaaattatttatgccccaaacttacaaatcaaactagttgcaaatgctagctagctaaccacaaaatctttggggtaactggccagtcagataacttcctatgtatttatttaactagagaaaatgctttatgtagcagatatctgaaatgctccataatttatgtgatatgtggtatactaaagggtagggttgtttgacttcataaaacttcattacacagaccaaaaggcagagttatctcgttcagcctgatgagggattgtctcctgaactctcacctgcatcacagaaggcacagtggttaagcacatggatttaggagtcagactgactgagttcaacactggttttgcagctcactagttgtgtgactttcatttcttcattaactacctgagtatatattttttccttttgaagttttaatgcatattagatggacttacatatgtaaacttagaacagttatgagactgttgattgcttttataaaagccacacttgtagactgcttcatagtttaaaaacttttaagtgtgcttttacagtgtgaggatttgaaatatcagcctattttctgtggctaatgtgccagtagaataatgattatgtagtaaattataaggtacttgaggtcagaagccatgccacatctgactgtatttctagtgctttggaaagtgcttagcacttagaagaaaaggaggtagaagagaaagaagaagaaggaggagaggagaagcacaaggaggagggggagaaaattttgttaagaacatgtattaaagagtgaatgtgtgtgaggtagaatgtggagtagctgaagatgaggctggaaaataagtctagattgtgcatacatcagaggtccagctaaggaagttggcctttgaagtatttgcagtagaccactggttctctatcagaactagaatcttgcttcaagataccaatctataaataggtaacacataaactggaaacatgctgatagttagctcagatttgtatctctaacccccccaaaacacatttaatataaactggcttctgatattgcctttaacctgagcagcaccgacctattgccattgaacattttcagaacacacatagtttaagttggtagaacttccagaatgcaaagattatttcaacaaatactgattgctcacttgctaaattctaggctcatgctgggctctaggaatactaaagtgcacgaaatagataaaattccctgctttcatgacacttgctgctcggcatcatgctgttcagtatggatgaagatttgccatcagagtttaaatactttaacctaattccaaattttgtctgcttcataaaattgccaacaaaaaatgcaagagtacacaaagacgggaaaaaaaaaaaaaaggaagtttgttgttgttattttgccaattttttccagacgtttgactttgctttgtcctggagaagtaaattactaagtgtccgtgtctataattttaataaataaaaattagtttctcttcatatgctattaaatacacattgggaaaaatacttaaagaatactatgagggggcttcaaattgacaactgaacagggagcccatgcccatctctgaccagccttgctaccaggtgagaggtggaaacacacccttgcagagcagtgggagaaaatgggtgaaaggactgatagagtaccaggatttgtgctttttttccactgatgagcagctcataagtgagcaaaattactgctgaaagtgggtgaacattatcagccaggtatgtcttgaactaaaagaggttgagacccactgtaactgaacatttgaagccagaggttgaaacaccacaattttattttataacaatcattctggtagcagtgcagaggatggattagaaagggaagatgctggaggcagagagattagttagaaggctattgcaacagttcaagaagaggtcattaaactaaggcaataatagtggaataaaaagcaagcagataccttctaaaaattgctgttcagtaggcaagccagtagccatatgttgagcatttgagatatggctaatgtgaccaaggagctgaattttaaaatgtatttaattttaattaagtttgttgtaagtttaaaagatactcaaacttttaagtatgtttagaataacttgagtatgtgaatctacttttacaactgtagatataacaaaatataaaatgcttctgatggaaaatttagattctgaaatgagaggtgttgttaagtgtacaagaagttccttgttttgacagcttggcataagaaacagggtttgctaaatgttaagtgtaaaacacacattggatttgaaaagcttattatgaaaagataatagaaaacattaataatttatatcatttatatattaaaatgataatattctgggcatattgagttaaaatatattctcaaagttaattgtatttagtaaaactaattccatctttttttccttttatatgagtagtagaaaattaaaacttacaaacatggctcatatatttctcttggatggtataggttgagagacatggtagcaattcggtgacaaactgattagattgtaaaggcaagcacggagtaaaagatgtcaaagatgtagcctgtgatcgtgtagatgagtgggtgattgggagatgatgagttcagttgttaatgtggtaagtttcagtcgcctgtgagacacccaggtagagatgctgagtaagcagttggaaatattagtatggtagtgacagaagtctgggatggagatgtgtctttgggagtgagcagccggcacttatttgatagctaaaattcagagtaaaattttaagtatatgaagataccctttttcataggccaaaagccttactaatcaattaaatttgatctttcaccaaacttttttgtctgtcaatcacgaatttccattctttattgggcaggaaggatttaagggctaaaattccaggaagagcccaccattaaagcatttacttagaagcctagttgcagtgtgatcttccagggcagttgagcgtcccccattcagggctgtgctctgttggcaaaaaggttagacagttttccagtttgttttgaggaggagagaggcctcctctgtgttgtcgatataagaatccctagttctggtctagcacaccatctcctaaagtaactcctagagacatcacaaattgttttcatcagaagaattttctcagaccccataaaaattatgtctagtcctccgattctaatttataatttggattatttatgtctactattaacttgagtaccccctatctatgcacctagattatttccttccattgtttaaataaacttgcccatgtctagagtgggccagcatcagcattaataggattctaatgctgtagaatcaccatcatcatcttgttttctggtctttggctgacatatttacaatgctgtttctattttgtaaccgctactgccatgcattttgcttatggctttcagcgcatttttttttgtgtgtgtgtgtgtaataaaagtaattttcctgatcattgtgcaaatgacccatattcagtatgtattccccaaactggttcttaaccctcaagcaatgtctttgtttctttttttcttccatcaatctatattgtgtttagagttctgcaaagcctccttaataacgtgcttgcatatagtttaaattattgctcatcatttcttcccgagacacacagactctgtctggatcataagggtaaacatattggatatgttctaaatacaggagttcttaaccattacttcttctaaaaattccagaataactaagatgctcctggattcctaagtcagtgtaagattataaatgtttgctcttttaagcttctaaattatggaaaaattggttacacaggaactaatcacacacattataaattgcattataggtgatcaaaaataatgtgtttattttgcctaaaatgtttcttaaaggtacgcttttgaaaaatagttagtagctatagaagaaattgtggtatagtcagtagtcagaaagaattcaacaagaagttccttgttttgacagcttggcataagaaacagggtttcctaaagccactcatcactggctaacttaagaatagatttgaagccattctataaaatagcttggggcccaccacaaagcagtgggtcaaaaggagtagtgatcacaggatggagcagaatcaatggacatgattttctccagctaggtaatgtcctaggaattgtttctgcaactcttccaaagagattccggagacctaacttctttctgctagcttaggaggtgaaaagatccaggaccaaccctgaaaacactcactatttgaaaaaactgttcaatgactgagtcaaatctatatagtgagagagaatgggaagaaatcttttgaacaggaattagaaatagagagatgacaagaagctcattttttaaaaaaagttaatatgtttcactggagttgaaagataagtagaaaaatgggaaaaatggacacgaaaagggaaagagatcaaaatgctgaagacattaaattttaggtacagaatttgcctttacccatatataattgcagcggcatcaatgtgttttaacaaaggaataatatgatcaaagaaccagattagcaaattaacctgccataagtatataaaatggatagaaaagtactcagaatggagacagaaggatagctgagaaagtgaggcagcagtacaagcctctaagtggtaagtatgtgaaccgagaagaagctagaaatagctgttttgttctcatttcttaaatttcacagcaatagaatttcagatgaggaaataactctagaattctagaaaccaaaaacatagagattaaatgacacactaaagatgatgaccagtaatttagaagttgagaaattgaattaacttccaagggaaaaggatgaaggtaggaatctgtattgattcatttacctctcctacctcccacataataaactatttagcacttaagccaatagaaatgtgaccatcatttctcacattttccccaaaaatgacttttacacctcagaagtttggacagtaattttacaatacatggtgaaaaggcattatttaacccatcttttgaaattgtagtaaaataggccacatgttctctaattcatataagaattaggaaagctacctcgtgatacggcaatagaaaaaataaataaatgaatgtaaaagaactaggaaagcaaaaccaagcaatatatatacaacatatgatttacaggactgaatctgaatactatatggcaaagttaaacctctataaaatcagtgcatctgttgattagaaagagtatttcaaatggaacataatttctattcaaggaaaaccctgaggggaaataactgggtttatcttgttgatataggtgtgcatctatgtataattactgactttaaaaaggtatttctgaatcaaatcttaatagaccagcaagataaataatgtataatggagagaagcagagaaagatgagaaagacttgacacgtcaccaatattggtgttattttgggacatgtaatatttactataaatacactgtttctagtctacactaaaaccaatgatcaaaaggcatatttctaaatcaaaatcaattaagagcttggtttcaaaataaggcttccggcccagcaaagtacaaagaagcaacacttaaggcaaaaatgtgcaacaattcactcatcaaatttgcaatgctcttttatgctcccaagatgaaaggatttcaaaacacactcttcactcatcccctcctccaccctcagtgacatttcctctggtcagaaccaatgcacatgttaatatttgtggtagtgaatgcatccagatttatagtgactttcttctgtcagagaggcattaagtaatttccaaatgacatcactaaactgctatatgagcgcttttctctagaagtgacaacattggtaaaatttctagatatatcttatataatataaaaacttgagctaaatttttcttattgcttctaagaaattatttaagtcattatcagttaaataatcctcaacacatcgtaacttaaacatgtcttgtgtaacacttcacagtttgcaagttatttctttatattctttatcttaaaaatctattatttgttaactgtccacacaaatactatacaagtaagaaagttaaaactgtaaggaagagagatgaagaaatatcaagacagaaaaataccaagaaataccagtcatttggggacaaaatgtttgctataaatcatataagttaactggatctcagctagcttgttcattcattcatccaacaaatatttattgaggtggttactaaacaaccagctcatttatttttgtatccacagagcctaacataggcctgggtcatattaggtgctaaataaatatttctggagaggcttctaggatgtactgaagtaaatgatgaaaagtcacattactgtattatttttctttcttttcttttcttttttttttttttttttgagacggagtgtcactctgttgccaggctggagtacagtggcacgatctcggctcactgcaacctccaccttctgggttcaaacgattctcctgccccagactcccaagtagctgggactacaggcatgtgtcaccacacccagctaatttttgtatttttagtagagatggggtttcaccttgttggctagcatagtctccatctcttgaccttgtgatctgccagccttggcctcccaaagtgctaggattacaggcgtgagccactgagcccggctatttttcttattaatcatcaccattattataaatcatgttctctgccatcagaaagtttatttctatttgtaaataatggacagatataaaataactagagaataattcatgataaaagtgaattacaataaataaggcaattattaacaaaaaataaacattcatccaactaaaatttcaccatagactttctttaaaccaccaatcaccataaccaattcttagttgaagatttctgaaaactacctttaagatttgaagcttctcaataatatggctgcttatatcaagttctatacttttctgtattgtaatcaggaacctggaggactttctcagagttatatagaaattaaaatgtctgtcactttacttgactgttaaataattgaagatctacactcatcctaagccacagtattttcaatgtataatttattaaatctattaaattctttcagaaaatatttattgagcactcatattctaggtactatactaattaattgctcttcacttcatgtcttaccttctcctcaccccttcataaaaccttaacaatttcaatagtaatattatatgactttgaggttaacagtggtagcatcaatattaatatgacaaaaaaatccatctatcaaaactgggccacctgactcaaaaaccattttattccaagttgttatgtttttaagagtacagttaatcaaaatttttaaaaatccaacatttttattctgaaaaattggatgacaaaccatgtcaaatattcaaatcttcattaaaattatatgccaatcagattttttaaattatctaatttaaatagcagtatatatttcagcaatgatggagcatctcttaatgcaatcaactttctaatttattggcttactctatcaaataaggatgaaaatattaaatctgatcagtacatagtatacttcactgactttgaaagcttacacaaattttccttgaagtttaatggataatgaataagtctaacttttacagataaaaatgtatcattgatagcatagcaccaattaggttaatttttaagtcagttatattcacaaacctaaatcataagcaataatctagaatttataaatcttatttttccttttaaatttcaataatgaaagaagtagaacaatttattgggcaaaccaaaatggactcaaagatacctaaataatttgataaaacagcctttcaatattctcaaatctaaatattaagaacagttctgcttctatcacccccaggcattatcttgtgttgctttgcactttctttgttcctttcttccctccctttctttctttcttctttccttccttcctttcttcttggcttcctgtctggttttcattttttcttttaatttctaattcctctttcttttattattccatgcacccaacattttgggaaagtgctggaggtaaacttaggtagtaaaaagaaaaccactggccttgtgttaatttttattatatgcttaaaacatggaaaaaggccgggcacggtggctcatgcctgtaatcccagtactttgggaggcagaagcagttggatcacctgaggtcagaagttcaagaccagcctggtcaacgtagtgaaaacccgtctctaccgcatatacaaaaattagctgggcgtggtggtgggcacctgtaatcctagatatttgggaggctgaggcaggagaatagcttgaacccaggaggcaaaggttgcagtgaactgagattgcatcattgcactccagcctgggcaacaagagcgaaactttgtctcaacaacgacaacaacaacaacaacatggaaagaaatgacttatctccacatcaaagacttgttgagtctgtaatgtctaatcacctcttctaggcaatgggagaaagaaaatttaatttgaccagatttgaactcagactgagtcccattagttgataaggagtgggtagggctgacaataaacagtatttgagaagcccaggaggacacggtttacgagcaagggagattttgaagatatcaagtccaagagaaagggtgtgtagagacatgcactgaatccaaagagaacgaccaggcaagaccaagatcggagattcagaaagaagaaggccttcacagtgcagctatcagaaatccatggctcgtaaaggagatatggagggtattacgctagaatggacgccgagaaagtcaattctttacttatgacaggaccctaagaccacatttgaccagaattggaaagaaatacctattcttgcagtctaaaactctttgaccataaaataaacaacagtggtttgagtaattcaataacacagccccttgtgatttgagagtgatcattgtagaaccttttctcagagtaaaagtgtaattggttatggatcaataagtaatttattttagaaggaaaaggcccttgttttcatttttatttatttattttttgaagtagcaaagctcttaaatcagaacggagcaaatacattttgaaagttgagcttactctaaacagcaagattccttactgtactagtaaaatttatcttaactgatcatttatttatgatgccataaaaatccagatgttcttaattttgattgttagaaatttgctaaaaggcacctgaaattacttttccagagttcccctcttgagaactacattttaaattgaaattttactatggttcaataatggctgtgctgaggggttttgttgtgtttttcaagcttatcaatgaattcagcccttgtggtcagtgtaaactcctacacagcttattggaaattccagaattctaaggcaaaattaagattaagaaaatagtttaataaaaacagagaattaaaaacttgtaaaagtttgtgctaatgtactttggtgtttcatgtttttcttaattattttagaactggtacccgatgaccactttctaacaggaaagaacatgatgacctaatcaaatgtcctttggagagtgagcactgatagaaggagaacttatagggaaagacaaaacaaaatagaacaaacttccatggtcgcttaatgcatgggaaataaacagaacctcaaggataaaaaagaggatggggagacttacctgtttcttctgaaatcttccaaaagatagactttagaccaagaactatgataataagaaccctttagaaaagtttttgaatatgtgacacactacgattttttggatatatcaataaaatattcatatctcttaataaaagacactgtgcttctttacaaataatgcaagaaaatgaagatttaaagagttgcaaacatactcattaataatttttaaaatgcagagaaataagtgcccctgaaccctaaagttaattatggcaactttcaaaggaaaatgaagtttttcattcatgactattctttgctatctattatatgctgagtaaattactgtgggaggcttacaactttagagaaaagagaatgggcccaggatgtaagtggtaattatgaattaaaatgtattttcctgacacgtatcaaaatgagtacaaaatggcacagaaacaatctttttgccatcttgtttcacatccccaagtatccttaaagtatactttcgttccttttatttcatgtagcttcagataagtactttctctagtgagcaaagaaataaagacagaatccagatctttggatgtcaccagtattacaacctcctgcttccagccagatggtgtggtatctactaggcaataacttattttattcatttggcaagtctgcctaaagacactaaaatcactccaaaatttttttaaaaattattttgaacacagaattaagaggaattcacactccaaaaaaaaaaaaaaaaagtttgcattgtaaagaacgcgattaactacagcaataggtatatggtcttatttcctctagattgtattcatatttcctataacaaagtactggtttctgggggaaggaagcatccaagaagcaaaattataaattctttacaaaaagttaacagtaaaaagtaaaagctgaatcttatgcaaaaagtacttactatatgcagttctaggtagtcacccaagcctgaagaactgtccactcgcaccaatacggcttctttctgaacagtgctaaaacctatggccagtctgtctgctcgtgtactgggtcggtcattaggaggccacttatacgtgatttgtccaccacctttgctaaagatatatgtcgtcccagctggaaaacaaaaaccaaaaccaattagtccaaatacatcaagtctgcacattagcaaggcatgttatattgatatatcagtaaagtatcaactctacacacaaaactatggcaaagtaaatcatagatttcaatcaaatgtgctcaagaaagtggaccaagttgttttaaaagaaatggagaggtagctcagtttttaatacactgattcaatttaccagtaggtgtttcagaacaaatagtaggttattgtgttttccattgagttggacaagaacggaatgtaatgaggcattatctcttcctgccagtttttaagaaatagtttagtagaaaacattgactggatgcttccaaaaagcaacagcagcacacatcaacttggtattgaaataggagctgcatgcagatgtgacagggtcatacagcacagtggagaaagtcgcaacaaatgtgctaggaatgtaacttttatggaaaaaggatctacttacatgtgacagataactaatggatgaatagccacaagccccagtagccatgtcaagaaaatacagataatagatgtcatccctagaagtcaggttttgtttaacaagcaacatctagtagctgtcaaactattcagaatcataaaaagacccacatcctctgccaccccaaggtgaatacaagccttatagcactgagaataatgtcacggactcattctgtgagtgttcaaattttaccttatggttgtctggtcagtaaattatccagcttaaatgaaaagagtctttttcaaacaaatttattcagcatttgatatggtttggctctgtgtccccactcaaatctcatctgaaatggtaaaccccataaaccccatatgttgagggcagggcctggtggaaggtgatgggatcatggagtggctttgcccatgctgttctcatgatagtgagttctaacaagatctgatggttttataagtgtttgacatttcctcctacacacacttctgtctctcctgctgccttgtgaagaaggtgcctgcttccccttctaccatgactgtaagtttcctgaggcctcctcagccacacagaactgtgagtcaattaaacctcttttctttatcaattacccagtctcagggaagttctttatagcagtgtgaaaatggactaatagagcatttggtgcactagtcttacctcaatgcatcattcattggccacccattttggttctattattttgaggtcctgaatagaaccaaaaaagaaagaaaaaagattggattttccctctgtcttcttctgactgcttaaaatgggacattgttgttttcctgcctttgcagcttcttgttctcatgccttcaaacctggactaaaatctacatcgttgtttctccagttgtcagtcccataatcgatacccctagcttttctggttctctaacttgcagacagcagatcatatatgatttgatcatatatacatgattatacataataagagaaaatatgaaaacttaggccacaaaacttcttgtatttatagaaaaatagcttgtaccaagagtaacatttatgtgtaaaagttgtgtgtacagcagtatgttttgaagaaaactatacattgaattgccatgattaccaagtttaccagttaaatggagttgacctactatcacatttgtgtacatttaattaaacagctgacaatattgattttgtggccatttttggaagcaactcttctttgttttctgttacagacatttccacaggcctttgagaaattccaaagacctctgcaatatgcctattgtacctgatgcttaaataggacttggtatatagacctcttccaagaaacatgttaggagaaaattgaatgcaaaagtgataaacatgaatactgttaaaatgcaaagctatagaggctgtacccttctctattaattttgcagataccaatgcatgaaaacagtttatctctttcaagagagaaaaggcaagccatatttcaaaagcaccagtcagtgcacaaagaaaattcagaatatacagagtgtagatcagaaatcccagggctttcctgagccacttatgttctacatcctcagaagcttgttcatcataatctttataggcaaacactatttgagaaatatttttctgcctggtaatttttgcaaatgattaagtattaacttttctagtgaagcccattgttgataaaaataggacaagaacataaaaaagtggagatggctttaaaaggaggatgtagtggttatctctgagtgctgatacttaataattaatttttttccttttttaaattggctttgttctctaatgactatatacattatgtgaaataagaaaaatattcaaaactagagatgctatttaatgatataaaacaacacatatctaagaattcagatggtttaagaattatataagtgtgaggtaagcattataaaacaacattgcatattaatttttaactttaaacatcactttcacaattaaaaaaaatcttatctacttattatggaacatagggcagacattacttccatgctatatctgaggaaatttagtcataaagattaacgtgctatctaaagttgcaaacttggttaattggcagagttggtataaaacccatatcctgatacctattccagtatatatatatatatatatatatatatatatatatatatatatatatatatatttatgacagaaatatttctgttatcataaccaggcagtcaagaaaaagttaattggatgtcagtctgaatttatcaaggccaactgttatcatattctaatgtcttatatccataaagtgacatttgctcttcattatcatatactttcttctcacctcacaatacttttaaaaagagaaaaataacatctaaatgtaaaatgacagaacatttaatatatgtagattaacatttagttggggtacacttcccaaacctatggaactatgaaagtttctagcacaattatagaacttgtgggtaataatttgaagttttacactttcagtaagataagtgtcacaatacaaataccattactcaagatttgatttcttctcagattttaacctttttcaatgaatctaaaacttgatgactagaatgagattagctaatctgtcttgtttagaatgactttacagttttttaggtttcaccaaaacaaagcaaaaaaatcgcaactactgtttgtcaaacattgccattatttctagtttccttttttcccaccagatatatcctgagagcagtctttcttagtttttcttctgtatgcacagtagtgcattgtattgtactcatcagcacaattttataataagcgagacaattagatatccagtccttcctcagctctcttctacatacttctataagcactctggattttttttaaaaaattaactttgcatcaaactttacaaaatctcctatattcttaaagccctcttttcactgagctagaaaattactctcataatcaaatatagtgggttagatggcttaaagtttcaaaatctacctcctttaacacacatctttctgaaccaaggacatgatgtacttactgaagcagaatagcttagagattaagaatgtaaactctagactcagagagatctgggttcaaattccaactgtgtcatttactagctatgtgaccttggtagccatttattctgtattgggattcctatttgaaaaaagatggggatagcaacactatcttatagagctctatcagaattacatgagatattacaaagtaacatttagtccatttcctagtatgtgataaatgcctaataaattttagagagaataggtgtcatgtgtgagggcagttgtgtgtgctgtaaaaatataaaataatgaacactgtaacattgttttattttaatatgaaagccttcagaaaagttggacatatttcaaagttatgtccaaatcaagtgactttcaaaaatgacattcctacctcgtaatttttattaatattttcaatattttgtagcacagattaggacttttatgtaaactcattatatcattatttatgttcagtaatagttgacaatggaaggaatattaaattgtatcacatgggagctttcatgagaaaaagaatattagctcatcaccataaaacatctagcatagtaagatttatagcataatgcaaaaaaaaaaatcacttgaccattaaataaagaccaaacttaccaaaaaaccctgccagctagctttttaaaaattttatctttacagaaacatgttttattttactatataagtgagttaaatatgcagtggcagtacatcttaatcacagttccaatatagagaggaacatagaggaatgtgtcacctttattatttatgcatgtttctatatggcaagcactaccacatcagtaccatgactactaatggatttactgcaaattaaccttgacatccatcagatcgctgaatgtatgaatgactgaaatttaaagtggttttcagcaatctccacatttaagctgtgcagcaagcctctattactcactctaaattcattaacaaagctggctctatcagacacaaatttagcaatgtcaacatactttacactccaataaatgtttgtaaaaaatatacatgggctcccgtatctcttgtttaaactgcctgtgatgttataatcagggaatatttttagatcttattgaacatgctatttacatatagggctctctcccttcttgttctttcttgccaactgtcccttgcctaagtgtgcccacttcagcctcacgtcaattctgcaaaggctaacatattcccttacatagattgaaactttctgaaaaagaaaaccaatcagcatgtacaggtctgctcaattattggttgctctggatccttgctacatgaacaataatataattaacttcggagtagattagcttctaactcataacataagtatatgaataaaaggttactttttgaaagcctataattcttcaaatgtcatcttgtagccaacacgaaacattcaggcaattatgtttctattaataaatgtaacaggaatataacacttccttcagtgaaagtttacagtgaaagccaggtacccagatgaatattaaaagtaaagcatttgtaagtaaggggaacctttattctttctacaaccttttccagatgctgttgttaatttgaaattttctggagaatttctacctatatggaggaattctttggcttaaggttcataaaaagcaaaagcacagagaagaccacattgtatgcaaaaagagttttagatcagggcaacatttctaaactgatgaaacagaatcttaacaatcactaaaacaataacaagtaaatacactttattttccttctgaattattgtaagttctttgtagaatcataaggaattatttcatgaagctgagcactataggttcctaattactaaaatttcatataggcatattaaaaattcagaaaaagtgaacatcttaggagaagttaatggaatcaagtaatgagtttctacctataatatgtaaccacttctagatttaaaaattaattacaataattactaatattgagaagtaaggcacagccctcaatgttacatatgcatgtaagggtgcaaagacaaagatgccaggaaaagaaaaagaaaatatggactatatatcataaattaagacttctggtgggaggggcagacaacagaattggcaaatgtgttataactagctaaagagattggagaattagacagatttttaatcacatctttgagaaagagaatgcatatgctctttataaatgaaagaaggcaagaaacatgacatgtcacagaaatggtttaggcacaggtcccatattctcaatcaggtcgaaacaaaaaatgtccagaagaatttagataattcccaaataatgaaagctttatggaaatagttaaggatgatattcaagacagcaacataggtcaacagatacaaagttacggttagataggaagaatgagttctggtgttctgttgcacagtagggtgactatggttaatattattatattgtaaatttcaaaatagctaggagagaggatctgaatgatctaacaacaaagaaatgataaatatatgagatgatgaatatgctaaacataccgatttgatttttacacaacatatatatgtattaaaacatcactataagtgtgtacaattataacatgtcaataaaaacaaaacacaataaataaatttgaaaaaagagaacaatgggaagtttgtcatatatagcaaattgtatgttctgtcaaaactctaggctaaagcattttttaattattaattttttattaaataaaattaagttattaaattttaaaaaatacgttgttgactacttattaagtcaaatgcaaactgagcaagacagggagactcaaacttgtgagcacactattttcttgcattggaatttcatgaaagtgatactgtctaggatcactgtccacacactattccaccaaacaccaatcataaatttggttcaagttaatccaaaagattcttgaactcttgcaaatcagacactgtcatacctccagtatccaggaggactcattaggtgttaacaattaaggttttccaaatttttaaggggatcagaggagggtgaaccagctagactccacggtagacattggaagtctgaaagcagaagagtattcctcttcaataagccagcccatctgagattaggctctagcccagccaagataccatttaaaaaaaaattgtgtgtgtttactcaacaagaaattttaatcaaaataaaacaattgagaaaatgaaataactaaaagttactgtgattccaatgaggtcaagaatcatttctctcaaatataatttcaatagtaattatgcgcttcaataaaaaatgaatttacctctacctattggcccaaaacttttctctaataaaaatgtttttctaataaatgttctacattttctatattctctaataaaattgctatatcttagaaagaattatatattcataaatacattttatcacattttgatgtttataaaaagagtatggtacatgaaaataaagtattcattcttctaaaaacaagtgtataccactctaataagtgaaataattatttaaaatgtaaatagatccatggctgacctatcttgtcaatatcctagacattcattcagaaacaccaccaatagcagcaaagactgcacactggacaatcaaatatgcaccattcatatagaatgagatgttaatgatgttcattggtgtcgtataaaactatgactctacataatcaatgatcaatgattgatagagattgtgctgatttgaataagttattctcttttttttctgacattataagggcattaactaacatagaaaacatttctaagccttcctatctcttgatttgctgataagtgccaactgtgtgaaaggagctaagaatataaattcagaaacagccttttctcttcagcagataggatctgttcattaaaggtaaatattagggcaaaatagtttgtgtgagatgtcagaaaaatggtggtgttctgttgcacagtagggttactatggttaatattattgtattgtaaatttcaaaatggctagaagagaggatttgaattttctaaccataaagaaatgacaaatgtatgaatatttgtcaaatatttgacaaatatatgttattcaaccatgttatcatctattttggatttttaaactgctttttaagaaggtgataatattaaaagcactgattaatgaaaacctaagattatcagaaaaaaatgataagaaaaatctatgtgtgtatatgtattttcttttaggtcaaagtcatgtaaatagttgagtagtttgaaataatgttcaacccaatgaacactacttttaaaaatgtatgcaataagtggtccacttagtggtatctttgcaatatattttcttttacaatctacttattattttcctggcaaatgtgtcatttagaagtatcccctccaggaacagttgagttcaatagtttgagctgcccagagagacaaacttgttttgagatcaaattcaaagtcctgggaactgcttaaaaggctcttggtccaggttacctggctgagtagaaaaacaggtaagtagtagaacttttgccaatcagatcagaaaaaattccataaagacagcaaagtgatctagaattaaaaataaaacaaagcaaagtaatcccacaaccaataatcctaagaacatcaaatgcttatgtcttcccttctgaaactaggctccctccagcagtaggtgaactttattaaaaagtctctggcaagtaactcagtaatcaatttgtattaaagctataggcagcagggataggaagaaaaagaatcacatcatcaggaactttaagaaaaatctattttgaagagcataacctaagtgtgcatgttcccagtaaactcttaaaattattagctggtcggtagaagttgtagttgcctagcaatgtcctttaacttacttatttcaaaggttaattgtgaaaatggctttcattaggattcaagagtcaagaattttctttactataattatggtctaaaaaatgtccagtttaaaaaaaaaaatgacataaacatagaacttactgccgaaatactcttggagaaaagtgagtaaattttccaatttacaaataacaaaactgaggcacagagaaaccaagtgtcttctcaatgtcaaacagatgggtgcaggcttgtacttaactctattcttagtgattttttttttctatacaacaaaaagctaagctcaaatgactaattcttatttagaaaaataaattataattcacaaatcaaggtctcatttcaatcattttagagtttttctaatgatgcttccctagtctgatttggggaaagtttctataatgacacttaacagaaatgattcactcacattctgacatttttagagtctatcctgaatctttaaaaggtgtgaggtatctgcaatgctttattgtaaacatcctctctaagcagccatccaagcctttggcttattctgaagcttctaaattgtggaccaaagctacagaagacaaattttccttatttttaccacagtcacttttactctataccagaaaggctttatgactttttggcagtgacacttctttttgtccttagcaatggaattaaatccttaatacaaaagaataggtatttattttgaattatttgcatcgcatagttaaatagaagggaccatgcaaacaataaaatttgtagtaattttaggctaaaaccagaaccttaacttttgtttatttcctaatgttagttctactcatttatcttcttcctgcctatctgctatacttaagtcattctttacctgactaggccctcgtcaaaaccatttactaattattttggactggaacagaagggaatattagtttttgactcagaaattatctcagactaagctctaactggatttacctaggcattcacaaatgcaatacacattctcctctcaaagtcacttttacttctgctggtttaggcttctctgctgcaccttgatttcttttgtcatgctttccacattcattccagccaaggttaattctcgcctttcaacatccactaacttatttttaatttttgaactattataatatatgagaattgtcttttattgaaatatccattttaaaaagtatgcatcctgaagaaagggatcttgctttaattctaggtatccttataaaaaattatgtgcttttattcacttactaattattaataatgactaatacactcctcaagctaagtcaggaccactgattcaatgatgaataccataagactcctgattctgaaacaagcataggaaagatttatttatgtgatccatcccatgcctacatccatcagcatgatggagtatctgcagctatataagaaattggaatgatttcacctaatacaacaatctcagataaggacacagattgcctaaattattctgataagaaaaaacatggtcgacttagttatacctgggtaagaaataagtattatgaagagacatgggactcctcaacctggtaatggtgatcacatgaaaaggagcaccagatctcacagttcacttgaatagcatagccaaaaattctgcatattttacagggaaaagctggatataccttgctagtcctcaggctttaatgatttattaatactcagagaaatctgacagatagcaccttaaccaggtgatcaaagctagcatcaccagtaatgagacatatcaaattcaggttctccaaatatggtacactgaggacactgcaacattctgtgctatttttggcaaaaattcacagtctcagttttagttttccaaaaatgcatagtctcaatctaatcataagaaaacatctaacaaacccaaattgaaggacattctagaaaataactggcagcactcatcaagagtcgagggcaggaaacagagaaagactaaggaactgtcctagattagagaaaactaagaagatatgacaacttgatgaaatgcaagatcctggctttgatagtggaccacagaagagggcattagtgggacaactggcaaggtttgattaaggtctgactcttacttaataatactacattaatgttaatttcctggttttaatcattgtactctggatatatgagatgttaacatttgtgggagctaagtgaagacacaagaaggctcttttaattttttataacttttttgtaaatctaaaatttcaaaataatttttaaagataaatatattagtcatgaagagcaatttagaatctctctcttttttattgagacagagtctcattctgtcacataggctggagttcagtggctcaaacatagctgatttgcagcctcaaacacctgggctcaagcaatcctcccatctcagcctcctgagtagctggggcttcaggcacatggccaccatacttggcgaattttttaatattttcttagagataaggtctcactatgtttcccaggttggtttcaaacttctggcctcaatagatctttctgccttggcctctgaagtgctgggattctgggtgtgagctatagtgtacaatttagaatcctgaataagattcttggccatgggaatttatgcaagagaggtagcttgagaaacacctacctcttgaaatgaagtagagtttgagattttgtttggctataaaaacaggagagcatttagaggtgggcagaagacatttaacttttgttctacctaataaatttgcttaacgcagagctctttgtaaataaatcattattaagtctttaaaatgaacatattctaaaaatgcaagttaaaatagaaattgcctaagtagagtagtcaactctgggatcagttcacccaaaaagacagacaacttattcattcatttaattcttttatcataatgtcattgtaaatatcattgaaattcttatgaaatgttttccagtcttaaaaccatgtagatacatagttttaagtcagaatacatttttcctgtcttgtaattagaacttcttcacattagtgtgagctaattccttccctaagtttggaatctaagagggaaactagtgtaaacaaatacttgtatgtgtagaaattggcatacgttttgggctgggtatggtgactcacacctgtaatcccagcactttgggaggccaaggcagaaggattccttgaggccaggagtttgagactagcctgggcaacatagcaagatcctgtctttacaaacttttttttttttttttttaattagctgggtgtggtggcacacatctgtagtcctagctacttgggaggctgaagttggaggatcacttgagcccaggagtttaaggctgcagtgagttgtgatcacatcactgcattccaccctggacaacaaagtgagaccctttcttaaaaaaaaaaaaagaatgaaatattgtggttatgatgaaaaagatgattcaaaaggcaggggatggtgataattatagaggaaggactcatatctcttctaataaaacaagacaaaaaaatcctatgagagatcacttttagatttcttgaaagtttaaaaaccagatggcttagagaggtggcagggaaaaactctaactcaaattaatgagtggggcattttgacacaaacaaacaaatcaacaaaaaacaatgcggagacaacagcagaaatatattgctggagacagaatacaaaggcaataaaatagtataatttaagaataaaaacatctgtatactcaataaatactaattaagcatttactatgtataaagcaccatgctagatcctgatgatgataaaaaggtgtgacatagctctgaaatccagctttttctcaactatcatgacccatccaaacacatgtcatttctttcctttctttttttttttttgagatggcgtcgcactctgttgtcaaggctggagtgcaatggtgtgatctcagctcactgcaaactctgcctcccgggttcaagctattctcctgcctcagcctcccaagtagctgggatcatagatacgcgccactatggctgtcaaatttttatatttttagtagagatggggtttcaccatgttggccaggcttgtctcaaactcctgacctcaggtgatccgcccgtcttggccacccaaagtgttgggattacaggcgtgagccaccgtgcctggcccagatttcatttttgaatttctctttcatatttccattcttaataccatccgcatcaagttaaaaataaataaataacttttctaataaatactttactgactgacttgctttactgacctgctaccttcttacctcttaatttaaatctcttttataaattaacatcagtttattttttgaaatagtattgctaattgcttctctattcaaagaccttcaatgattaagtgactgtctcccaaattaagaatttatggtaacttggactaccttatgtacaaaccaaccctgtacttcaagcaaactggagaatttgcttgtctcccaaatactcccaaattattttcatagaagataaaatttaatatggctctgaaaagataagagcaaattttattggcaggattttgatgaggaaaggcaaaaaggcacaaaatttggttttcaggagtaggttgtagatccacttatataaatggaaagtcactttttaatattttttttttttagcggaagctgatgcatttttaaataccactatgtcttatctctttgtctcttgaattaaatctccagataaatacagagcacaaatcacatagtagaaattaggactattcaaggtcagtgttaaaaagagattagataagttctagtatcttagtttattaaaaattctatgaaatgcaaatttcctttaacaaggagtcacataaattcacaaaagtagaaaaatgtaatattaatgtcataagaaagactgcacttagtaagtgtcttggtgatattttgctatttatcataaattgtgtcattctatctttatgagaaataaaatcatttctcattttttcaaaatttaaatttaagtaccgggatacatgtgcagtacgtgcaggtttattacataggtacatgtgtgccatttacctatgtaatagatattgtattacatatgtaattgtatatttattacacattgcatatgtaataaatttattacatatggcatatgtaataaatttattacacattgcatatgtaataaatttattacacattgcatatgtgtaatattacatattgtatatgtaataaatttattacatgttgtatatgtattacatatgtaattgtatattgtattacatatgtaatacaatatgtaatagatgcatctattagcccatcacctaggtattgagccccacatgtgttagcattcatcctgatgctctctctccccctggctccctgacaggcaccactgtggtgagctccccttcctgtgtccatgtgttctcattgttcagctcccacttataactgagaacgtgcactgtttggttttctgttcctgcattagtttgctgaggataatggcttccagctccatccatgtctctgcagaagacacgatctcagtcctttttatggctacatagtattccatagtgtaatgtatcacattttctttatccggtctatcattgatgggcatttggagtggttccatgtctttgctgttgtgaatagtgctgcaattaacgttaagtgtacgtgtatctttataatagaatgatttattgttctttgggtatatacccagtagtaggattgctgggtcaaatggtatttctggttctaggtctttgaggaattggcacactgtcttccacactggttgaactaatttacattcccaccaacagtgtaaaagcattcctctttctccagagcctggccagcatctgctgtttcttgactctttaataatcaccattctgactgctgtgcgatagtatacgattgtggttttggttcacatttctctaatgatcagtgatgttgaacgttttttcatatgattgttggcagcataaatgttttcttttgacaaatgtctgttaatgccctttgcccagtttttaatgtttttttgtttgtttgtttttgtaaatttgcccaggttccttgtagattctggatattagacctttgtcagatggatagattgcaaaagttttctcctattctgcaggttgtctgttcactctgatgatagtttcttttgctgtgcagaagctctttagtttaattagatcccatttgtcaatgtttgctattgttgccatttctttttatgtttttgtcatgaaatctttacctatgcctatgtcctgaatggtattgcttagattttcttctagggtttttacagttttgggttttacatttaagtcttttttttttttaacttttttaaaattttatattttaaatacattttgtccttttttttttttcttttttcttttctttttttttttttttttttgagacagagtatccctctatcacccaggctggaatgcagtgcgtgatcttggctcactgcaacctctgtctcttgggttcaagtgattctcctgcctcagcctcccaagaaactgggaatacaggcatgtgccaccacactcagctaatttttgtacttttagtagagacagggttttgccatgttagccaggctggtctcaaactcctgacctcaggtgatccacccacctctgcctcccaaagtgctgagattacaggtgtgagccactgcgtccagcacatttatatctttaatccatcttgagttaatttttgtataaggtgtaagtacggggtccagtttccattttctgtatatggctagccagttttcccaacaccatttattaattagggaatcctttccccattgcatctttttgtcaggtttgtcgaagatcaggtggttgtagatgtgcagtcttatttctgagatctctaaactgttccattagtctatgtgtctgtgtgtgccatgctgtttggttactgtagccttgtagtatagtttaaagtcaggtaacgtgatgcctccaggtttattctcttcatttaggattgtcttagctatacagattcttttttggttccatatgaattttaaaatggttttttctaattctgtaaagaatgtcaatggtagtttaatgggaatagtatttaaactataaattgctttgggcagtatggccattttcatgatattgattcttcctatccatgagcatggaatgctttttcatttgtttgtgtcctttcttgttttcttgagcaatggtttgtagttccccttgaagaggtccttcacttccctctttagctgtattcctaggtattttattgtttttgtagtaattgtgaatgggagttcattcacgatttgactctctccttgtctattggtggtgtataggaatgtttctgatttctgcacattgattttgtatcttgagactttgctgaagttgtttatcagcttaagaagattttgggctgagacatgggggttttctaaatataggatcatgtcgtctgcaaacagagacagtttaacttcctttcttcctatttgaataccccttatttctttctcttgctcgtttgcactgaccagaaattccaatacaatgttgattggaagttgtgagagagggcatctttgtcttgtgtcagttttcaagaagaattcttccagctttttcccattctgtataagatttgctgtgcatttatcataaatggctcttatgattttgagatatgttacattaacacctagtttattgagagtttttaacgtaaagggatgctgaattttatcaaaagctttttctgcgtctattgagataatcacatagtttttgtctttagttctttttatgtgatgaattacatttattgatttgtgtatgttgatttcaccttgcatcccagggataaagccgacttgatcctggtggataagctttttgatgtgctgctgcctttggtttgccagtattttattgaggatttttgcatcagtgttcatccaggatattgacctgaagttttctttttttttgttgtatctctggtaggttttgatgtcaggataatgctggccccataaaatgagttagggagaagtccctccttttcaattgtttggaatcatttcagaagaaatggtaccagctcccctctgtatctctaggagaattcagctgtaattccatctggtcctgggcttcttttggttggtaggctatttattactgccttactttcagaacctgtttttggtctatttgggaattcaacttcttcctggtttagtcttgggagggtgtatgtgtccaggaatttatccatattctctagattttctagtttgtttgcatagaggtgtttatagtatactctgatggttggttgtatttctgtggggtcagtgatgatatcccctttatcattttttattgtgtcaatttgattattttctctttttttttattagtctagctatcagtctatctgtcttattattttttttcaaaagaccagctcctggattcattgattttttgaagagtttttttgtgtctttagctccttcagttctgctttgatcttggttatttcttgtcttctgctaccttttgggtttgttggctcttggttctttagttcttctagttgtgatgttagggtgtcaatttgagctcttcctagcatttttatatgagtatttagtgctctaaatttccctcttaacaatgctttagctgcatcccaaagattctggtacattgtctctttgttcatttctcaattttttaagtggtggttttatgcttagtagaaacagtaacagcaaaagaaataaaaaaatataactttggtttgtttgtttactcattccttatctcaagcctactccaacagcctatgaagatggcagtaagagtaaagttcagccatttctgtgatttatctatccacatttattttttttgtagacactgtcatgctctgctgctctgtcacccatgcttgaaagcagtggtgttatcgtggttcactgcaggctcgacctcctgaactcaagagatcctcccacctcagcctcccagatagctgggtctacaggcgcacactaccacacttggctaatttttgtatttttttgttgagatgtggttttgccatgttacctaggctagtcttgaattcctgggctcaagcgatccacccaccttggcctacgaaagtgctggtattacaggtataagtcaccattcctggcttatccacatatgtttataataacggttataaaaaacaaacaaacaaaaaaaactggaaagttaggtcacttacattgacaagaaattgtgggtatctgtaagatttataactcaacgatataagattttttaacccatgaagttctttggccaattaaatttaacaaaggaaatggattttcaagtgaaaaagaaaagaaagaggttctctatggagaattttacattttaccacccatgtgaagattataactatgtatgagagtcatttttgaagttgaaataattgaaacacaagagcacggattaaagtaccaaatcagacatggggcaggtaagtgtcaaatcttttttcttttgtatttggttcaaaaaattctatctttctagactaaaattacaaggtggttccaatttgcacatcagatccttgaacactcaggtccccaatctcaaaataacctcacatttgaaacatacgtccttaagctctgaagtgaaaatggtggagaaaaacctataaaacagaaaggatagaacactcagaggtgaagcaggcttccaacttaaaaattcccagttctagggtcattttaaaaattttaattcattttaaatgggttattgtattcaaataaagtttgcatgccatctgttttcaaagtcatttaaattaagttttatgactcatgaggaagagaggccatttttaacacattatagtctgcttattactatcattaactaattaaaattaattattaagagtgattccttttgctctcaaatcttctagatcatttatcaaagaatgacatgactttctcttccttccttggaatactgaagtcacagtcatatgacttttgggtagatgctattgaaatgatgattttagtcagatgtttaacagtaacgctgtctaaaagctacatttaaccaagagagcagtatttttgaaacagcaggcagtataaaactgctttgtgaatattaacatattctagcaaattagtttgcactcattatcataagcaattgcttactgtttagatgcagcttgtattaaattggcaagcaatttgcaagaattaaaacataacatggagagctttctgaaaactcagcaatatcctgggagaaatgatgctactaggttcacagaccatgtaccaaacgtttttacccattaaacatatttagcattagaacaatagttggttggctacataggtttttaatgtaagatcattttctaaccgctgtttggacaccatcaacagaattttatatatcagacatttaaagactttgttttaaaaagcctgaggagaaagtaggaaggctttgttttctaaaaatgaactagctatcaatttgactaaattttgatacttcaataacctattgcattgtcttgagttactttatgctacccaatttgtccctttcacaaagtttctgttgtcttgatcattctttccatttattcctgagttggattctgctgatgtttacccctatccactttactttctttaataacagaacttttgagtgtcagctgagcagatagataactgcgtagagcctacatttcccattctcttttacagcttgaagggtctattgactaacttctggccaatgagagatgagcaaaaatgatgtgtgtttattctagttcagatcctgaaatgtgtctgcattctcctgcccatttccctctttcttgcctagtgatgacaaaattgaatcagctgcttcagacttcgagatggaagccaaaggttgagaactgtacaatcctatcctaggacgactgaaatgtgactattatgtgagaaaaaagaatcttatactgtgttgagagatgagtatttctgggtctcatattgacagcaaagggtgtttatccaggctttgaaaaaaatgacctaacatttccatgtatttttttaaccttatgaggcaagtaaatttgatagagaagctattattatctccattttatggatttaaaagagattaatattcaaagagctaaaattatttgtccatggtcacaaagtaatgtaaaactttttctgtcaaaaccttccacaggaggctaccgataatctattacctttttaatagtaaactgaggttacctaccctgaataattctatgggaggtcacatgtatttatggatttccccattctgcaattctttgctccttaagaaaacaaaatttgcaaaacacagtaaaggatattgcttgtaatatgaaacaaagttaaaataactgacccacacaagcccctcagcttgaatagacagcatttactttagaaaacttttaaatactttctccaccttttgagatttaaatcttctcccagctttttgccagatttacggcttgaaaatgtctttctcaagggcctaggagtcatctatttgaaatgtaatcatcaaggaagacagtgctctgtctaccagtatctgaaagggtaagagcctaacctctggaagtgccaacgagtaattttttctgtactatacatataataaaggactaattaatgggaagttggataataaagaaaagtgtaatgtattaaaatctgtacatcagcaaagaaagataatttaaagagtatcgttaaagtgctacggagtactgagaaaagagactatccaaaaacaaatctagtagctagttttatggtttttcaaatgataaaattaaaatataaaacaaaaaatttaaattttttattgataaagtatctgcacaattttttttttggtttcccagtgcatataaaggttgtttatactataatgtagtctatttaagtatgcaacagcattatgtctgaaacaaacaatgtatataacttaattaaaaaatactttattgctaaatcatctgagcctttagcaagctgtaatatttttgatggtggaggatcttgcttcattgttgatgggtgcttactgattagggtggtggctgctgaaggttgaggtggctgtggcaatttcttaaaacaagacaacagtgcagtttgctgcatcaaatgactctacacaaaagttttctccatagcatacaatgctgtttgatagcattttaaccacaatagacttctttcaaaatttgagtcaatcctctcaaaccctgctgctgctttttcaactaagtttatgtaatattctacatccattgttgtcatttcaacaatgttcacagcatcttcatcaggagtacatttcatctcatgaaaccacatttttcattcatccataagaagcaacttctcatttgttcaagttttatcatgagattgcagcaattcagtcacatgtccaggcttcactcctagttttagttctcttgctatttctaccacatctgtagttacctcctccactgaagtcttgagcctgtcaaagtcatctatgaaggttgaaatcaatttcttccaaattcctattagcactgatatttttaccgtcttccctgagtcacagatgttcttaatggcatctagaatggtaaatcctttccagaaggttttcaatgtactttgtctagatacatcataggaatcactatctatggcagttataactttataaaatgtatttcttaaataaggcttgaaagttgaaattactccttccttgggttataaaatagaagtgttatcaaggataaaattatattaatccccatgtatatctccatcattgggtgacaggtgcattgtcaatgagcagtaataatttgaaaagaatctctatttctaagcagtaggtctcaatattgggctcaaagtgttcagtaaatcatgctgtaaacagcatgtcattcactctttgctgtttcatttatagagcacaggcaaagcacatttagcataattattaaggaccctaggatttttagaatggttaataagcattggcttcaacttaaattcaccagctgcattagcccctaaaagagagtcagcctgtcttttgcacctctgaaaacaggcattgacttttctccttttcagctgtgaaagaagaagatacctacatggcatcttcttcaaaaactatataaagctgttttgtctacactgaaaatctattgagtatagtcaactttatcaaattttagctaaatttttttttataacttgctgcagcttctacatcaggactgttgcttcaactgacctggaaggggagtagaagatgtgccattcactcagataggaaacatcagagaagaaacatgatgcttaagtaatataaggggtttgttatgttagaatttagctaccttcctccaggtaagcataccacatcatctctacattcctacttagcatactgaagtgtacatggaagacttttttttagtatcctgctaattaatcaagtaaataattaagaagacatcttcaaatgaaaactctgccctcttttgtagatttttgccaaactcaaagttataaacacaattaactcctcatctcttttaaaatattctccaaatgtaatatttagctttcaataatacctttccatgaaacacacatgaattggctttatctgaatatttgcagtgttccccttttttccaaaaatgttaagaaatcattttatgaaacaggtttcactatactatattgtcccaggatgtcatttgcatgtttactatttggttttctaaatacatttatcggtacaagttattgtacttagttgatctgcttcctctactcatcaaggtggtttatcatttgtggtgcataggtgagcaataggatctagtgtaacgcgggcttaggttcaaacccctgcatgtacagatgaaattgggttatctgcacttcttgtacctttcaatagtgggaggagagaaggaaatccatcactactggaaaatatgctctgtactctatcaactctgttgaccctcagcataaaatattttaaagcatttccctaacaaacaactctagttagacaatctgtatcataaccactacttttatctatgagacccctctgtctcttagaacatagtggtcatgggtactggtagcccatatgatgcctttaggaaaatagaaaaaaagcaaatctccaaaaccctctacttctgcctattgaaaattttcatgatttttgtcagaacaagacatttgcttgatatttcctagaaaattgtcatattaaatatgcaactccattgtgaaaacagtataaatggtgccaccttaacaagtgtacaacttgcacaaacatccatggcatccttttagtaagatgtaggaaatgattaggttttgggttaagacggagactcaacacatttggaccctgttgttctattggaatacaaccacactcctcagagggagaaaatgcaagagacacacaaaagaaccataattcctattcaatcactttttttaatgcaaagcaaacaccgatgacaaaagaagttcaagctttttttttttccgttttttttttttttttttttgaaagaagccgtcttacagagttgaaataagattagtcacagacctaacctgtagaaatgaaatttctgaaaaggaagacagtatcagagcagtgttaatccaagatgtatgaagaactaaaccatagcagcttaagccatatatttgaagcacagatttcagcaagacaaaactgtgacttgaaaaacgagacactcaaaatcctcaggagatcagtctcttctcctgttcctctacggctcctccaaagtacagattcaattttgagtcaggttaaattgggggctgaagtgggaatatatggttaatgaattttgtacagtcttccttcttttcaattgaaaaagaacagagaaaaaaaatccctcaaaaagacttcatgggttttactaagtctttccaacatttccccccagattgatttcagatcatgtagagacaaccagactgctaattaaactattaactctttcttctaaattgcaaatctttgagcatttacactgtagaagccacctcactaactctgaagccccgaggaatatagactttccatagattgggagggaagtaacatacacattaccctaggccaaatttgaccctgaaaatgaagtcatatgcactaactctcaaaatatttaattatttttcccagactttgcttaacaagtgtatataacaaggaaagcctctaaggtacgctcagagagattcattttctcctggagttaaattgaaaggtgacacaatgaaagctctgttatgattcttttgaaagcagcaagattatgttctcagccaatgtaatgtatagctgacacagaataaagtgttggccaaaacagaggaaatgtgctgaagtccaaagcctccatagacttaagtcacaagacataaatatacttatggaactctaatgccctaggttattgtataaaagtgatatgtgtgttaaatttttaaataaaccaaccaaaacagtgtagcaaattcagctccaaaatagattcctttaattttgaaagatatgttaacaatatagaaatatgtaaaaatactatttcttttatataaagtgaattctttacctcttccatcagagcagtgtctacactctaaattcattaataaattctccttgtcctatgtgaaaatgagtaaaaaataagattgcaaatgtggaagttctcaaccttgaatcaggaaactatagatctagtcctaattccttgctttgtgactttgccaaagttattgaaactatacaataatcctcattttcttcttctgaaaataaaggagtttttccaggtaatttatatgggcatctccagctctattctgagtttaaaatgtcactccaccaaagccggcgttaaccttgaacttgattccagagtacactgagcatgaagtagaaagttaaatttatcagtgaggcaattcagcagacaacatgcaatgacttctttggtttatatttatttcattcttatttgactttcaacaaaattgcacagaatgttttctgtattttatggctgtgaaacaacacagtagaggacattttattttgcctagcaattctttctatgattaaaattaagacataaatacagaagaattgaatagtgtatgggataagcactgctagcagttaactttttaattttctaaaatcatataccctacatggctgttctagcaactccacccaaaatcaatataatacaaaatccatagaaatagtagtctaaaaccagttccaggtttattagaacctagttatgtaattactgaggtcttctctttttaaatctataattactactgttatactaaaaaggttgggttaaatgttattaggcaaaaccaccctggctgatttgttttgtgaatacatgttaagataattcctacttagaagaacagaatcattccaagctgaaattcttatgagccttagtaggttctattgtcataaatatgactcagatccagaaagggattcattaccctattctagcagtcaattttagttgtgaaaatataaggaaaagtcaaagcatattctctacagatgtagctgcagtggtgtcattttcctccatgcttctggttgagaaaaaccaggcatcgcctcaatggtccacagattattaattcccattgtaagataatcctgccaatgttcaccaaaattatagccatttcttcttttgcatgtgttcttatgtgttggagtttttggcaaagaatttaaagtccttcatagatacccagttaaataatcctattactcattccctggtagattaataccttttgaaatgcccttagacctttcacatcatggaatagaaactcatgttttcttctgagttacatgacagtactccacacactggctgaattttgtctatcatctcactttttctttaaagcactaattggagactacatggcaaggtgatgatcatttttaccaagaggaaaacacacatacacacacacacacacacacacacacacacacacacatacacaaacagcaaatgacctgttcagtgtcataaagttggtgagcaggaggaacacataggtgttccttctgttatttattcctcagatttgaaagttctgcccttcatataactgtcccatactgaagcagtagaaccaatgtacttatggtaaggtggcactgtgtgtactctcaacaaatgttaattaaatggacttagggcaatctcccctctcacctatttgagaggtccaaatgacacaaattattatttttatataggtagctattaggtcttcaaacacatatgaacaattctgattgggatcattcatatgttatatataacaaataggcttaattacagttggtcattaaataatatatctactgcagaaactgtggaaagtacaaaattaaaaacatagggacttaaaacaggtgagaaaatttttaagtgatttgaccactgaaggtgaaggaaaataaataaagagaagaataaaaacaataagaacaataacattggttcaagaaatcagagtatgcatccttttagaggtctccaagctgtctgtgccttccatcttaacacctagttcaataacacgcctgtttagagggtggcagctacattcaaaggagtcaacataactttgtatcactctattgattggctatttggcttgggaccagcatagaccagaattggtctagaggttgctctcttgctttggagatcatttagcaagtgacatcgtgtgaaatcaatggcctgttactgctttcatcattctcaagttcagtatcataagggtccttaagatttaatgaacctagtctgttgagtgaagctttcaacctgctatatttcttctaacataccaaaatggcttgtatgggaaatgattactatcttatgcagtaggactgtgcaatctaagacttatcaattaaggataatacggcagtaagataaacatttaaattagtttttcaataagatgtgtatttatatattttccttaaagaaaaacagtgaaacagctctctactggctaaaaaaaaagaaacaaagaaaatcagtcacaattgaacgcacacatacgcacatagaaacagaatagataacattgtagaacagtcgctaggtctctggagattcattaacatttcatatccaaggagactagccattcattccttctaaaacagaaagcattttcaaagcaatatccatgtacaggtaaacgacaaagcaatcattttgaaagaaggtaaattacggtcagatgggtagagaaacaaggaggaaatgtcagacattctcatcagcagaaagaggcaacaaacagcaaaatatatatcatatatatgttaaatatatgtattatatatctatgtataataaatcaatgcaagaggtgaatgagaagtaggctgtcatgttctccagcacaaggatgatctccctaagtggtacaatgaaatgaagaaactcccccagaatattataacacagttatatgtcaattttcttaacagatttttgagtgttctgtacacacggcaggaagaacattgtggaaacatttcagtaaagagttataatctaggcctctgtctcttggagacaagaagtgggaacaagaccatgagtctcatatcaagaccacacatctattttctttggaataatgtcatcactaggaccagcagaagcttgactaatcacatgtgaaattaagtcaggggtcctagattttttcaagaaaacaacaataacaaaataggagtttaaaataattgatgggtatagcgcccaaagcattaattacatgtagaaaggttttttaaagaaaacctttaaaatttccagatgccagaaaattctttttttccaaaaacatttgatatgggagtttaatagtatcatatgaagaagtatagaaacttctccatttctgggggacttttcatagagataggccaactcaccaattctaggtttcctcatggtgggaatatatttgcttactggtaaaaaagtcttgggcaaggacaacaaacaccgaaaaaaaatgtgtactctgatctgatcttgaattcccagaaacaagcaacttcctgttaattaatcctagcaaggccagagactcaggaaagggcagctcttttctacgtgagattaaaactctctctacatatattataggtgcaccatcagaagagactggtctaagggcttatcataaagaggggagagtaactgcactgctaatctctccaacaaaagtgctactgtgattacatcatgacactataaagacctggataagtgttactgtattaccacatgagttactagttcctggacagaatgcccaagactgtttctgattcatttttgtgaaactacttccaatagcaacgaacaaagaagaaaaatacagaaaccaaaagcaagacatagcacaattcttcaggtaccaatttactttatcaagttttcaccttataaaaacagaggtgatatttggacacaagaccagaaaaagtcatcttccgagcatatgtcctcctcaccacactcattcacacttaagcaaatacatttcacccagggttcttggaagccagcattccacatttagaaataatttctttggcttaaagattggctattcttacatcttcaaatgcaagagaggagcaagttaaagctagaaaaacggtcacacaaagatagaggtttgaggaccaattttttattttatttatttctttgttattattattattattattattattattattatttattttttttttttttgagatagagtctcactctgttgcccaggctggagtgcagtggcacgatcttggctcactgcaacttctgcctcctgggttcaaccgactcccctgcctcagcctcccgagtagctgggattacaggcatgcaccacaacgcccaggtaatttttgtagttttagtagagacagggtttcaccatgttggccgggttggtcttgaacgcctgacctaaggtgatccacctgccttggcctcccaaaatgctgggattacaggtgtgagccaccactcctggctgaggatcaattttgagatcacttgactccagtttttccaagaaccaccctgaaatggacagtgtgaattcaacataactaaatatatattatatactataaatgtatatataatgtttataaatttttatatatgcattatattttattataattatatattatgatataactctataatatatataatttttatatatttagttacatataaaatatatttatatatgtatataaatacacacacacacacacacacacacacacacacacacatattttctttctagaagaactaaggtaaagttgcgtttgaaaatggtaataagagtgtgtggccagaaagaaggaagcagcaagttagttgtcaataacactggccaaggcaaactctgaccctgtctactttccagcttttgtctttcctcgatactgctttgcctaacagactcttccctggcattaatgactccgctgtgaagaaggatggtttctagtttagtgacacaaaaagatacgtttggtatttaagaaagcataaagggagcataactccattcacctatgtcaaaattacttggataaacaagtatagaaaacattagttattcttctttattatagaaaatggataaaactaaaactcaacttcatctctgtgtacagatagcatagctacctagggaattaattatttaatttgtgcacaccttatgatcatgcctcagaaaagaactgccagagcaatcccttgtataggctactgtgattctgtttttctgaggctaatgtgctctgtgaggttgtcagaaaagaaataataatcagttatttctttgtttaactggagaggcagatgaataaagcatataagaaaggtacaaggaaaagcagcttaaatataaatacaagctagtcccatttctgactttgtgtctacctttgaccaatggtgaatgaatttccttgtcactgtttctgcattttgaagaaagtaagctgtattcatattttttctcagaaatactatgttaaatgtattagtgtatgtccttgataaacaaaatgtaaaactcagaagaagaataatgtttatggtacatatatttcttcaaagtaagaaagaactattcatttcaataatgccacaattgaaaattgagccataaacatcctgaagggccccaaagttgaaaacaaaaatgaataagactaccaactttttaactttttcagaaggatgaagctgcttgcattctttggggagcaaatgttaggcttttttcctatttaaattaccacaacattgtcacgatctgacattcgatttataacaactaatcaagaaatatttacctaatgcccatagcatatgaggtattatagggaacgaaaatcttacacactggatatttaagacccctattgagggtaagccaaattagaagtaaccgttgtataaataatgctcacattttaaaagcactttatgattttcaaaatatgtttcacattggtcacttcatttaacagacattatcttatttgaagtccaagaagagagagatccagaggtggaagtgattaaaaaaaaaaatctgtgaatttaaggccaggcacagcggctcacacctgtaatcctagcaatttgggaggcagaggcaggtggattgcctgagctcaggagtttgcgaccagcctgggtaacatggcgaaacctcgtctctaccaaaatacaaaaaatcagctgggtgtggtaacgtgcacttgtaaacccagctacttgggaggctgaggcacaagatttgcttgaacccggaaggcagaggttgcagtgagcagagattgtgccacttcacttcagcatgggtgacagtgagactctgactcaaaataataaaataaaaataaaataaaattctgtgaatttaaacctgagctggcatttgaaagaagagttgggcttgaataagaaagagaagaagccaattatgactgaaaattgctttgttctttaattttcataaacacataatttactagttccttaagtacacaaatatatgctttcttattatcctacttaggcttagtactacacccaacagtgacctggggagcacatactgaattaaccaatagggaggatttgtccttctgtatctattttgatcattaacaggacactttacaaagtagctggggagttcagagtatagctcatggctatggaatataattgagctcacagactcagggagtcaatcccttcacttaaggttcattagcctgggttccaaggatcccagggggcgattccttccttttctgaatccccatagcacacatcacccagacaatgtctgtaggacaactttagcacttcaaatgaaatattgtctgtgagatctttgcttttcaattgattcgtgttatctttgtcttacctcccaattaatctccagagctccttgtagataggaactatgtcatccagattctttatctaggccacatagcttctagccaattacttgacaaagcataggtgcataaccaatgtcttctttgtgcctctgagttgcaaacgcagttgtatatctacgttaatgaaacgatgcttcatgcctgtattttaaaaactgatgcctagacaggtgagtaatgccaagcagactatgcaagctcttgtggtttctgattatcagataagagtcgcttaatttggtaattgtgacattgtagatatggaaagtatagtaaaagccaactagtgcagaaccctcattttttacatggggaaacagacttagacagggaaagtgccttgcctaagatcacaactaatattgtgcaagaatctgttgtgggctcagcatatggtaggcaattatttcaatgaataaagaagtaccagatgtgggtcacatggtcccctggcactccagccgagaaggcaacttggtgttatttctatgagtccttgcaggtgtggaatactgtatactcttccctttgctgtattgtttctgccaaaataattgtattttgtagctgtattttcacttaaatataaaagcagctaaaagatagtatgcactgtatttcccaactttgtatttaagtccatgattacgtctacgtatttacacagattccttttcaaaatacttacaaggcatgcaccaaaataataacagattatatctggccaatggaattcttggtgactttaatctgactttttaaacatgtcaacatatctccaatattgtcatgaatatataaacaaacattaattttatagctagaagttaagtccagtaaaaatatgtttttaaaaagaaagacactacttctacacctgccaaaagcctgccgttttgcaaactagtcgagttttctcatgatatataaattagcgcaattttgaaaatgtaaatatcaattattgtgttacaaaaaaacaacttttaggatgtgggaagcagaggttctgctaacatagagtttaacattgagccttaaagaggcggaaaggtctaatttgggaaaagactcgttccttaaattttactctagtttttctttctatttccctccataaggaatttataaactcagactttaaattccattatttggacttacaaaaagcacattctgttaaaacaaaattaaattaaattaaattaaattattagattaaattaaaaagccctatctgcatgataactatcccctccgtttctgaccaaagtctcacagaacttcccccattatgtgttgaaggaaatttgtatttcaaggtacaaatgagaatgactcaaaaccatgtgggagaatcccagatgcattatatagattaagtgggtgtggtgataaaaaagattaggggttaaataaaatggttgctggtcaccatgagcctcttattttgtattactaaaattcaacctaccatcatttgtaacatgagcgtggggaaagtaaattgtgaattgcagactattttgtatacatatgaaactttaataattatagatccactagctagactgagaaacactaagtacttctagaaaatattgagcgttgtgagaatttgcttaccttaagtagtattactatttgtatttggagtcctctaaactatgcaaaaggatttaaaattggagatctttactaattaaattgtttattcatcctttctccagaaaaataaaaggtatgtctcagctcaatatatttcagaactatcagaattttgaattctaaaacagatttttcccattatacacacagtttatcgacaccgtgaaagtataacgtacaagcaaattatatatttatatgtaaaatgcatatagatatagtttttttttttttttgaaacagagtctcatttgttgcccaggctggagtgcagtggtgcgatctcagctcactgcaacctccacctcccgggttcaagcaattctcctgcctcagcttaccaagtagctgcggctacaccacacctggctaattgttgtatttttagtagagacgggttttcaccacgttggccaggctggtggcgaactcctaacctcaaatgattcacctgctttggcctcccaaagtgctgggattacaggcatgagccactatgcccggccatatacagatataggtttttgaataattgtctttcaaatactcatgccatttatgggtatgtatgcaattatatgcacaactgcatagttacaatgatataacataaatgaaaacaattcagaatactaaaaagtgttactcataagtaatatagtaaagtagtgtgaacactactggacaatattgatacaaaacacaaaaatgcagtatttcacattagcttttaggctacctgattgaaatgaccttttaaaactcttgtggagtctgataattgaacttagctaccaataatggaaagtatcatgatttaaagaggacagaatgttgtattttgtctacaagaaaaaatatattttctgtctacagaggagtataattaagatttagtagaggaaaaaccagtgataattgtcatattcctctctttcactctcagcatccaaatgatcactcaaaatggtcattttttaaattggtgcagtgcaactaagagctattttaggaatggttatttccataaaattctattctattttcttcagtcttactgaaaatggtgctttctgtctaaaccatcaaggtgttaaaacatattaggacaggttgaaacccaatgagagcaagtgacacattttaacaagattttataggtcactgtcttgcaaaaatgtaactcaaagtacatttatgggcacacaggaaaattttaacaactgagaaacctattcataaatcttgtacttattttaaattaatttattagattatatacatgactggcattgctaaaaaatgtaaacttgcctattttggtgaataacagtacaataatggtactttccttttccttcataaacaaaattttttaaaaagacaagagaaaaaaaatcaaataaaactaaagaacagccaatctatgaagaagtatttcctatggactgcactgaaacttggacctaggtaaaggacgaagcactaggtcaaaagccacccgagaggtaatggactatgcagtctgagttcctccaagggggggtcacacaatcccaaggatagacttaatatttatttacagaactcaaagtgcttggaattggggaaatgggtgtgaggacaaattgcaggagggtccctgaccttggggagcaggtctgactcagagaacacacaggctggctgttttgcatgaaatagatgatgatttagcaatgtggcggagaaaacgtagaaaacaagaagttctgtaactctccattttggtcaaccaaagagaagtacattctatcaccacaggtcagacctatgacaccagttcactatagacctaccatctgcaagtggagacagccacaggaaaaggtgttttggtaagggtggagaaagagacagtaggagaaacgtagctgactgcttctttagtttaccactactatattagcattcaataaaacttgatactgaaaacaacagctcccattgaacaactggaggtagaaaaaagtggcaaacagaaaataaataccaaaaatttttccaagatttagccagaaaatattgagaatctagtttcaatgaagtcaaaagaaaacacagattctctgaaacaagagtctgaagaagagatgaagaaagtaaaagtagactaaaagcaggaaaaaatggaagagtaaataaaactatggcataaataaaatccactccaacagttaattcttcctctttcaatagaggctcaatagatacagcataaagtgataatctccccaaaagggaacttaaatatacaaattacaagaaataaaaggaaggatcataaattttccagatttagaataaaactgcaaaaacacacagattgccacataaacacattctaaaaatgcatgctacttattaaaagagaaatttaaaaagaaacccttaatgaaaaaaaatgaatttgtaatacataaagaatttttacaaccaataagataaaacccaaaaattcaattaaaaactgggcaagtctgcataggaagttcatgaatttaagaaattgaagaaacatcttaaaaaacacataaaaattttaaaagaagtggctctaaacatacaaaaacatgtccaaccacctagtaaagaaagatcaatgaaaacgacattgaggtaccattggcaaatattgaaaagattgacagagagcgttgggcaactctcaacactgttcaaaggaagggaagtttggattcaaatacattggaggaaaatttggcaatctaccaaaatgaaaactgcacaacattttccccccaataattacatttttaggactttatcatacaaatgaactgaaacctgtttatataaatagccagtttaattaggccaagcctgcattaaagttagttctcaaatgagttaaacagtttccattttccactttcttttatttgtctatgtcttaacccaaaactcatgcaaaattttccagcatgatctctccccaaaatgtgagtagatgaaagatctggatggtttgtgttttcgagtgctattggtaaatcagaaattttttaactttaatgtgcaaatctcatttttacagtcccttattaaatttaaatttggtataaattgaaggagctcactatatttaaaataacaatagaattgaaaacctgacataggaagggcctgatacatcttaagaaaaatttagtcaagtataaccttaatatttatatacacaacccaaagtccatgttaattccacttggtattactatataaaagagattattatttatgcagccaaaaaacatatgaaaaaaagctcatcatcactgcttattagagaaatgcaaatcaaaaccacaatgacataccatctcatgtcagttagaatggcgatcattaaaaagtcaggaaacaacagatgctggagaggatgtgtagaaatgggaaggcttttatactgttggtgggagtgtaaattagttcagccattgtggaagacagtgtggctattcctcaaggatctagatctagaaataccatttgacccagcaatcccattactgggtatatacccaaaggattataaatcattctactatgaggacacatgcacatgtatgtttattgcgacactatttacaatagcaaagacttggcaccaaccgaaatgtccatcaatgacagactggataaagaagatgtggcacatatacaccatggaatactatgcagccataaaaaaagatgagttcatgcccttcacagggacatggatgaagctggaaaccatcattctcagctaactaacatcattctcagctaactaacacaggaacaggaaaccaaacactgcatgttctcactcttaagtgggattgaacaatgagaacacatggacacagggaggggaacatcatccaccagggcctgctgggggttggggggctacgggagggatagcattaggagaagtacctaatgcatgccgggcttaaaacctagatgatgggttgatgcgtgcagcaaatcaccatggcacgtgtatacctatgtaacaaatctgcacattctgcacatgtatcccagaacttagagtataatttaaaaaaagagactattgcggagactgaaaaagagatagaaggaagaaaaataaactaaaatctgtaaaaatagacatcacttttcaatataaaatgtatctcaaactttctgaagatattgcctccattttttaatctctaaaatgagcataggctggctgccaaagtccacaatgtaaatgttaacaaattatagtcaaaaatgcctttcaactacttaaaaaaaaacccataaaaatgtagttagtagtcgatgttgcctaaatagagtctcgaagcctacaatctgtaggctgtagaagtgaaccaagtcaaaatttaaaaacaggcttctgtacaacagattttctctgtatacttaactcacattagaagtgtggcatgtgttacaaaattgatgtcagatagcttagaagacttcatatgttttgaatgacaaggtattgaccatggtttctgcaaaagaaactaagcatcataaaaacagatactttaaacaccaagaatatcatcactccatttgttctgctcctttagaggtcctgtgtaattggaagtgaggctactggactacaatgttatcttttacaatgaactaccaaatttagatgtcagagtgacagttgaagaaaattgcttgaatgggaaataaatgaacagtcacagaataaaccaagtctacttgcccaggccttgtgttattaactagagggatgattactgcagcaagaagtgatagcttataaaaattctatgaaaatcaatatagatttgcagattgtaacttcaacaaagatttgatttgtcaaatattagtctaacttgctttattcagcacatgcatttctaaaattattaaagacaaatattcatgattgaaatctaaatgcaatattttttagaactcttgtttttaaatatttaaagtttcagacagaaaaaaaaaaatctattcatgggtagttgtcttcacttactatagtcccagaacataattgttgccccttgacttttattcgaagatttggcttccccacacaaaatttgtctttgtctaacacagtaacactttatgatgtcaattaataattattgattcattgagtcccttctaattcacttacattaccaatcagtagttcattttggtagaattcattccttatgtttaggtaaatgtggaaactttcttccaaatacagctccttcaaatttaaaagaaaagtgcctaatctttgtctcctggatttttggcacgtagttatcaatagaacatagtaaacatagcagtgaattgctgtataactatagtgtcaaaagccatgtttgtttaatgtgcctgcattctgccaaataaattaaattgttcaatcactgtttttgatgataataattatcatattattacccattcctaccttgcaaaaaaaaaaaaaaagcccagtctgcaattttgctggttaatttaaaccagaaactaaactgcaaaatggaaatatttaaaggaaagtagcctttgtattcaagcagggcttactcaaccatagaaacgtgagaaactcaagaacaaccacaacaaaaaaaggcttcttgatgcttcttttgattctaagggggaggtttctttagcttaattttttatattattgcagggaatccttcaccttatcaaaaccacacagctgttaaaaaataataaaaaataagaataaaaagcctaacactcattgtgcttgctgtctctttggaccaataaaaagcggaaagtatgagatgaacatgatacaagtatgtttatataacgggaagaacattaaaaggtagagtttctgcaaaaatgaaaatacctcaaacaattaagtttgttgctttaaagcaagattatagtgtagggcttgagataggaattcattagatatttaaaatgcagcaattattaagtctgtgctaggatcaagttttgcaatgggaatacttacccttggatctcagaggagaaagaaatacatccttctccattagagacctcagctacatgatagtaacttttatttaaaattttaaaaagaagagtgaccaaggtgttatacttattgtcaaaggcactttgcttccctagcgaaaacttgacaacattgtaatctttctctaacagacatgttgcaaagctgcttgccatcttgtagtcctatatgatttccttgcatttccagttctttaggaaatcccctgttttaatgatctttaagaggggaaaagacccttcaatagagaacttgctatttatgccaaatttgaaaaagtagccaaataaaaatgggctataaatgaggtctctttggccatttcaatccaatatagtcttacttctagcccccctgctttgactagggctctcatttcatgtaagcatcatggatttgatatttacctgtatgacaaacagttctacagaaggatagccttaccttttaattaacacagttagctacactatgaaagtagaaatattcgttcagaatgtaagaatgtttttaaaatattataactctctctgtataaataaatggagtttaaaacaacaacaacaaaaaaagcctaacatttgtatttagaagatacaaataactcaggagccacaaaacaacagtcgcctgttaagaatcctattaagaattctgactttttctttactttaaataagtaaataaataaatgttaaaaaatggagtataacactctactctgctgcttgctggctttcctaacaatgtgagcagttgacattgcttggccaagaggaactcaaaaaggtccgtccttccttccttccttcctccctccttcccttccttccttcctccctcccttcctccttccctctctccctcccttccttccttcccttctttttccttcctttcttcccttctttttccttccttccttcctttttccttccttcctttctcttcttctctctccctctttctctttctttctttcttagccaggagattttaaggagtcagtgtctagaccatctttgttttgatcaccaagctcagtagtcaatccatagatgaactattttagaaaaatattttcatgtcagtttgtagctggactgctttggtagcacacccattaaagcacaaactcctttaaattcacagtgctttgtgtctgtttatacaattcccaaagcataaaaatttcaggattggagctgaagggtgcacccatctttatttttctgcttttgatgcacccttcaaattgcttcacacccttctatacaatctaccttgatcagaaatatgtatttatcatactattaggggaaaaaagaaacatatgttctgagtggcaattaagttaccagcactgttaaggtcctggttattttatgtaatctaccatataactcaaaacatccaacaatattggccaaagacattgaccatagatagtgctttcttatcttttcctttctctctctctttttttttttttttttttgagatgaagtctcactctgttacccaggctggagggcagtggcaggatcttggctcaccacctgccaggtttaagtgatcttcccaagtcagcatcccaagtagctgggatcacagacaccacccaccaccacacctggcttttatatatatataatatatatatatattatatatattatatatgtattatatatataatacatatataatatatattttatatatatattatatatatatatatttagtagagatggggtttcaccatgttagccaggctggtgaacacctgacctcaagtgctccgccccccttggcctcccaaagtgctgggattacagatgtgagacactgtgcctggccattgatcatagatagtacctttaaaaacgtatctcaatctaccacttctaatctgagtgaaaccgtttgaattgggtccaaaggttaatcaagggcccctgtattttgttaatatgaactctctaaagggctttatatttacgatttgttttaagctgcttactaaagcatggtggaacatattttacctgctaaaaaatattctacaaaagcatcaaaactgaaagatgaaaattaggccttactgagaaaagaacccctttatgtccaaaacggtccaggataggctggaattcaattatagtatggcaaaatattgtgaacaggctgagataagcaacagctcgaagacttcttgggttgattctagtaaaaaattatttaaactacaaaataacttaatgatgtgtcactggcctgacaaaccattaaaataatctagaagtagagatttaattacaaataaagcacctcttaaaatattaattcctaaaataaaaatgacatgcttatccaattatatcacaatccactcatttcctcttcccaccaggctgaagtttctctttttatattttaaggcttaaaataacatgggtttaaacattttgatatctgtggcatcatttgtcagggactatcctattttgtgggaaccactcttcaaatcattggcctgtacaaaatacaaataatggtgttagtgttactacttgtaccttttccaccaaatgacccaccagttgcttatcagctgatacagttatctataaaacagccctaaggtactggtcatcatcaaatttataataatatcactgtcaacattttctgttaaagaggaaaatagatcaatctaaataataacagcttaaaagttacaaaatgcatcactataatgtgtatcttaataatgattagaatttcacataacatgctagcaaaatacttttgacatgaggaaaaaatgtttaaaactgaataagaatgtcctaaaatactgtatgcatttggcctcctttttcaccaaaatttaacttttttggttgtctgccccaggatcataatgaccatgatgattatcctagtttaggtaatttattaataaggtaatgactcattaattacaatgtttacataaataacatatcaaacaactctgatgaagctttataagtaaatcaaactgaaaatgtgctctgtgattttactaaagacagccacaaagctttaaatagtgcttgtttatagaccactttgaaagaaaaaaaattcacttcgtatctcttgttgacaaaatgccaagaatcattttcaaattagtagcgataaaatattaagtgattcataaatcataatggaaaacagaaaagttgaagtaaatataggcttgaaaatattatctcagaggggtacaaaataatttcaaatggcagtaacactaagccacttacttgaattttaaatgtgaatttgtcttgaaattgtagttcaggtttccctccaattaagaaaaagtattctattaaaaagctaagcagggcttgcataacagatatattaacgcctgtaatcccagcaatttgggaggtcgaggcgggtggatcacgaggtcaagaaatcgagaccaccctggctaacacggtgagccctcgtctctactaaaaatacaaaaaagtagcagggcgtggtggcgggcgcctgtagtcccagctacttgggaatctgaggcaggagaatggcgtgaacacgggaggcggagcttgcagtgagccgagatcacaccactgcactccagcctgggtcacagagcaagaatcagtctcaaaaaaaaaaaaaaaaacagatatattagaagtcaactattcactttaaaaatgcattattaatttatgaaatgattattaataagattgttttaaataaatgggatttcaagttgaaaatctcctgagattttctgaggttaccccatatcagaagcacacccccatatagccatgtggcatggatcctgatgaacctcagtctttggagtttaacaggctggggttggaatcccagctctgtcacttgttggccaaatattgtatttcatctattggaagctcagcctcctcatctgtaaagcgggagtaacaaaggcctaccttaaaaacgctttgaggatagcctgagacaactatggcacatcataggtagttaagtggtgattacattggttaacattaaatcagagaaaatactatgattcaggctctgacggcgctctaattgatagcttgggatctccctcccaatattctcccaagtccaaagtggacataggatgctcctattgagcctttcctgagggaagaatatgattaatgaaagggaggttttcctgtttttgtttggtttggttgttgttgttttgtttgtttgtttctgttttaaagtactggagatttgtaatttattttgaacaatgtttcaaaagggtgaaaaaatatacatttcagggaccatgttaaatggaggccaaggaaaactgtatttttattattttttattaaaaaatccataataggccgggcgcggtggctcatgcctgtaatcccagcactttgggaggccgaggcgggcagatcacgaggtcagaagatcgagaccatcctggctaacacggtgaaaccccgtctctactaaaaatacaaaaaaaaaaaaaaaaaaaattagctgggcatggtggcggcgcctgtggtcccagctactcgggaggctgaggcaggagaatggcatgaacccgggaggcggagcttgcagtgagccgagatcgcgccgctgcactccagcctcggtgacagagcaagactccgtctcaaaaacaataataataataataatccataatagtagaacaatggcaacatcacaactttgttctgtcctttttgtttgaaacatgaatgtgctatggagagccttagtgagtgaacaaaaccctctgcttggattcaaattctacctttccataactataataaagtcgcttaactttttttttgtgggattgttgaggctcaaatgagaaaacacattagaaaatatctggtgacttgacaaacatataaatatgagatactgttattattaatgataaagatgtgttcctggtccctgcactaaggaaggaagtgaggaggtccccttccacaaaccaagagctcaaagatgataaactgttcccaattaattcacaaattcagataagtaaggatcgcaaaaatgagacccagtcatctcagatttatttgttggtgcaaaatcttttagaatctgaatctgtactatgatcttgaagtttcagtgctcaagaacaaaagcaaaagtggtttctattagcagtagaaaacttgaactccttcccaaacatctttaaagactcatcatccttaaaataaacatatcaataagacagagttttaaactctatatatttggtcttgagaaaaaattttattaatattgagaaattaattccattgttaccataaaattagtcatttcccaaaagcaaagccctacttcatgcctgcagtatgaggcattgatacatttaatcaaaatgtcttacagttattgctttttagttttatggtctttgctgtgtgtgttatataacaacagttttggagcactacgtcagaagtaggaagcagaagatgtggctggaaagataggtagagcctgtatcataaagagctttatatgccatgctaaggattttgaaatttaccacttaagtgatgaggatctaccaaacagttttaagccaaggagagatgtagttctatttaattttaggcaggtcactcagtcagcaatgtagagtatttttaagacattaatcacagcctcaaactaagatattacagttgacccttgagcaatacaagttggaattgtgcaggtccacttaaatacaaatctttttcaaccaaattctgttggaaaatacaatattcacaggatataaaatctgagtgtatggagggaacacttctcgtatacctgggttccacgggaccaacagtgaaacttgaatatgcactgatttgggtatgatgatgaagaaagaggtcctagaactaatccccccaaaattctgagggactattataattaagtttgacataaatggtatagtttgggtcatactgttgacttcaagtatttctatttttatattatacttcctttcataatgggaaatcagatgaattctttgaaaatatgactcaattccaaagaaaatccaagttaaaatttttttccacaatttgttgactaattggagcagcaaaataattttgagtagtcgaggcaaacagatatccatgtgctttgagtgttggcaatatgtatcaattaacaatattatcaactctaatctcactttgaagtcaaagagtaatcaaattaaaatctttggcacaagttaagaacatagatctcttttaccatggatacttgcttaaactctttgagtcatgaataatttatctgtataatgggaacaataagatatttcacctatctccttttatttttgagacttgtaagctctgtgaaggaacactgtatgccttcttcattgttgattgtcaagctcccatgcctcctggcacacagtaggaatgaatcaagtgaatataaaaaagtattaccaaatgaaataagaatgtgaaattgttctgtaaaccttagaagtatcatacaagcattagtgctattgtttttgtttcacctattctgttattagcctccaactttttaagatgtactaaaaagacaataatctttcttcaacaaaatttaaaactaccatctctgaagatgcatttatgtgttaaaagtatttttatgcaaatgcttaagaaataatgaggagttctttaaaaattgaatctgctgcctttctaaatatctttcttgtttaaaacacaaaatacatatgccaaaatgaatcaataacttccttgtctggtacagaatgttaaggcttgaatttgaacaaagaagctgaacttagctttggatatctattataaaagatatccaaatgaagaacgcattgacacaatcgttaattagtattcattatactactcctcaaatagaacgatatcaggtctcctatatatcagtgattatttctcttagcttatccaagtttttccttttctactgcacataactgttacacatttgaatctgtaaccaggttttatgatttaatatatgctctgactgtaacacctatattttctgactaaatgcctcctgtatttcaatggacatctcctgtagcccctattaaaagtccctctccctatatccattcttctcagaaacaggctcatttcttctcaaggctagatttggagaactctaggtaaatgccaaaacaaaacaaaacaaaacgtaaaacatctttctctctctccttccctcattctctttccatgctatacttttcctaaccagagtaaagttccttgggagaagtgcttattttcttcaccttgccacatcagcaaaagcaaagtgatgcatcacaaatggtattacagattcctatgattctgagtcttcaatgcacattcatgattgagacactgctttctcttggaaattatggtgattctctgacataacactggtacagtgacctttgaggattctctgtcaacagtcattgatgaaagataacaataacatttcagttccttaaaagtggtatttctcttcatgtcttaatccaaggccgatactgtaccatctacttggaatctcttactcatcccttctcctccctttgcctaatgaacactgttcactcagcaaatgacagtccaaatgatgttcccctatggaggcctttgctggcctccctcactaggtcagggtttcccattatgtgacatcacagcatcctaattcttcttctatgacacttaggatggttttaaaattacaacaccttggggattcttttaataatggctgcctcccacaacgacatataatcttcatatggaaaaaggctatattttgctttccatcatccacgtaggggagtgtctaccacagaatatattgtagtcagtaaatgctttctcttctgtttatccttactcaccaaaccaattctagcctcctcccactcttatctacttaatgtagaaaaatcagtggggctaggcaagagattgttcttgatattttctgtttcttttcaaatttatttatttaaaaaattgtcatacaaaatttatatatttatcacatacaccacaatgttatgaagcatattcagtaacaccttgcttaacctcatggataaattactggaaactgcaactttcagcaaaaagatttataacaaaaccattttaccacaggctaattgattaaaaaaagagttaagttcctggtcacaaaaacatcaccaaacttctgtataaagactcaaaacacttctaatattaaacattgaattaaatgtgaaatatatatacatttaagaaagattaataaaaagataattatttatccaatttttggtgaatcaatgagtgatggcagttgtagttgtagtgggttaaatcaaggaataaatgtttgcaatgcaaaaattctaacgagcaccttctaaaacaaacaagaacaaacatggtgtgcccactgagtgctttcaaactgcattccttattgttgtgcatttgaaagattattgcaagctttatgaattttttattttacaataatttgtatttatttattcattcattcattttccaatccactcattctagttcagagtttgggatggttcaagcctatcccagcagctcagggtgcaaggtagaaaccaagcctggacaggaggccattccatagcagggcgcagtcacacacaaccccccacacacactcactcagactgggacagtttagacacaacaatgaacctaatgtgcacttgtttggaatgtgggaggagattggaatacccagagcaaacccctgcaaatatggggaaaacatgcaagctccacacagtggtcctgaccaagaatcattttttttccctcactaatgttataactaaaagactgagagaaacattattcaaggacctgttgtatagattgtaaaatggtcagatgagaagtatatattttttagatttttacttaaataaaaagacagcaggtagtaatttaaatgtttcagtatgcctacaatctttcagaaataacttcatgaaattcaactttacgaaatgatcttcaaaatacccatacagcacacctttcaataaacggagtttcatttgacagtgtataaaagagtttttttgaaaaacaaaaaaaaaacttgaaaaaatagcaatgcatgatggaataaggtattctcaactttcaactgttatagagaataatagaaaattttaacaaacagctacctaagaaaagatatatctctcaggtagatttttaaatatttttaaaattaacagataaaattgtatgtgtttaacacatacaacatattcttttgaagtatatatacattgcagaatgactaaatctagccaatttacatgttacctcacatagttatcatttttgtgatgaaaacacttcacatccactgtcttagcatttttcaagaacacaatgtattgttaactgcagtcaccatgtacaatagatctcttgaacttacttctcctatctaactgaaatttggtagtctttgaccaatatctcccaaactccaccaacaccacctcactcctaccccctagtaatcacaattctactctctacttctgagatcaacttttttcgaatcaacatatgagtgagatcatgtagtattcttctttttgtgcatagctatttcaattcacataatgtcccccagtttttccacattgttgcaattgacagaatttccatctttattatggctggatagtagtctgttgtgtatatatacctttttaaaaaatattcattcatccattgacaggtagaaaatttatgtaaagcagttaactagcaaaagcagttaacaataacatcttaatgtgccacagatattatgtgaagaggtagaatgataaaccaaaacaaacagccaattcatcaaatcaacaaaactagaaaaatctctgacatcctattattgatgtgagtacattaaaaaattgtgaggcaaagtgactgctacaaagttgaaaaaatacttcacataactcataaatatatagaaattcatattatcgcagaataagcattaagataaaattagaatttgcaattaagtgttcttttgataaatgggaaattatttttagctcctaagatacagcctggctttttgtaataataccattgctgctgcttcttcctcttcttcctgttatcattattttacaatatagacatgttgattttggcatttaagtgtaaattattgatgaatagaacttatattttgttgaaggtgctttgtaatttttaatattgtaaacatcatgatcatcaataagtacaggcttgcaaattacttccctacatgacttaactgagcttaatattttttcaacaagtatataaaaaataataatccagggaactatgtgctaaagctacttacgttcagtgctttacatgttttgtgtacctaggtctcacatttaatatcatttcctataatttcctggattgaaaattaatcagacagtgtcttctctttctacattcttcttctcaaaataataggacaaaaatgtttaatccttctttatggattttaacatgccattagtgctggaaagcatgaaaaatattacaggggaaggtaaccacaaatggataggagactaaaaattgacattgttgtcttccaaatgttcatataatttccattttaatgcttttgttttttagatatatttaaaggtatgttctcttctttacactgcccagagatcacattgtctgaatattagcaagtcttatttccctaagatggaaagtgcaacagagggaagatgactaaaaatagcacgtctctcaagatgtttgctttctatcacctgactctaggatgcagtcttcattagggtacaaatgtattataatggaatggtctgatttctgtttccatattttatgattctcatagtctaccacttgttaaatttaaaagtacattttaaacagatgaaaataagtgttagttgcttgctgataagaagatttaatttcccatatgttgcagcacgcttaattcatttaagaggtgatattcaaaaatattacttagtatgtattaaatttttatctttaataacctaggaagtttgctagcctattatttcctgatacatgaatttataaataatctggttatttgaatttggaatacaaagcaccctactgttgaggaaaggacctcgagggcatgtatagacacaacaaagagggaggtgaccaaaataaaagtatgtattattgatgcacaacctaaatacatctttgaggctttatccagtggaaaaaaaactcaaataaatttttctcttggatgttcaaacagcatgtaattatgttgtatcatatgaataactttccatcaaacatttactgaacaccaattttctaggagttttatttaacaatgaagctaaagcagtggttgtcaattggagaagattttacttccagggacatttgacgatgttgagagatagttttgattgccatgactaagaaagaagtgccactagcatctagtaggtaaaggccagggatgctgctaaccatcctacaatgcacaagacagcctacacagcaaagaattacccaccccaaaatgtcagtaatgccacagttgagaaactctcagataaagacataaggatgacttaaagggagataaaaatgaagaaagaataccttttgtattagtctattctcatgctgctaataaagacatacccaagatggggtaatttataaaggaaagaggtttaattgaatcacagttccacatggctggtgaggcctcacaatcatggcagaaggtgaatgaggagcaaaatcacatcttacatggtagcaggcaagagagaacatgcagggaactcccatttataaaaccatattatctcatgagacttattcactatcactaaaaatcacgggaaggacatgtccccatgattcaatcacctcccaccagtccttctcaggacacgtgggaattatgggatgtacacttcaagatgagatttgggtggggacaaagccaaaccatatctccttttaaagaggtgactgtactaaccctaactagaagagatagctccatgaattaaataatggttgaaatgagacgaaaagtcagatgcagagattgtagggaaagagcatagacaggatacaacaattgagcggctataagagaagctcgtaagaaaggtgaggaatctagggcaattcccgggtttctgcttttgatgacctagtagcaactcacagtatattgagatagggaacgtataaggagaaatagaactggatgggaagttagcttggtttgggaaatgacttagaggagaatgaataacatgtaaatggagccagttgcaaagaatataattatatatgggaatgtgtaaatctgtagagccccaaggttaatattaaaaagacaagaactagccatcaaataagttgaaattttacaccatagatattactattgactaaaagaggtagctgttaggtgcccttctcacaatgcaaatgaggagtgtggatctgggtagctgtgattacccccataatggtgaagttcccctctaagtcacttatgcaaattttagtagtaatgcttcccccatctaatattattctccacagaaatatccacttattcactgccttttcatatgaatgtgtggtataaagctggactgacagaaaaggtaccttaatagaaaccagaaactgatatatttgctaaagctctgtattatttggcttctttcctgctacatgaagtaaaggccatttcactgtattcctaaaggcaatttactattagctatgaattttcaggtaggcttaattaatcaaggtcttaaattaaattgaagtatttattacaagtatatgcatcacaaacatatttatataatttataaatagatttgtgtataatttacttgtctgcaaaacacacagtaccttactgctattgatttcaagtagaatcaagacacttggattcagtgcacaggaaggaaatatgatatctgtccattccataatcagctaacctttagcaaattcattaattttttaaaaggaaaaatataatatttagaattccaaacctcaagtggtaatcacatttcctgagacaacccagttattgttagcacttatatgctaagaaacaattagaaattaattttttagtgaaattagaatccaattaagcaagacagtaagttataatagtgagaaaatggctttcagatttgttcagaataaacgataccagacattttatctacttcagacacatgatgaaagtacaaactctgaaagttcacatttaaaaccaagaaaggagaaatcaacaggtgaagctcatttgcgcaaaataattaacgacaaatgagtagtatttctttcccataaaagaaaagattcatgtggcacttaattatttcatttacccaatacttcgcctgaaattgaagaagctctttttcaccagctgctaaacaaaagcaatttattcaattgggtttgctttgcatgagttgttctgtatataataagggaggaagaaaataaaaatgtgtaagtgccacacttccttccaaacatttttgaaagttatttgtggttccttgatacaagtcataggcataacaccaggcctgcactttattgtaatcattaaatttgtgtgatttgagtattctttcttattaataaactgagaaaataatgtctggaggaagagaaataagacagtgctagtttcctacgttctctagccagctaggcaacaagctctccatgaaggaggccaagccactggaaccacactcccactgtacagcagagaggactggagggggctgttctgtgggttcccaatcacctgttgctttggagttagaatgctggtttaggccaacatagaaatggaatttggttttaaagaaataaacaacagtggtaaaatgtccagatctcttctggacaaaacatggggccaagaaaggaatgtagctgttctagaaggcactctgctgcatgtggctgacagtctgactgaataatgagagctttcgtcaaatgcgactggcaaaggaaccctttccaaactgcattttttctcagggcctatttgcctgcagttgaggtgcaattacccgtcaaatgtggatgtaatgtagccacgtgacaccagcatatttctatttctagaaagatagcagagaaaaatcccctagtgtaatcatgttagtgtatgcttactgtcggaaggaaagggattttttattttgctcctggagttgaaccacagaagttgaaaaaaaaaaaaggctctgaattaaggggaaaaatctgatgttaggaaacattggctcacgtgcttcccactttcaggaactgaacagtttcaacaaataacctggtttatttttttcccagatgcatgcatctattaaagcatttctcttcctccaagtacataaatgaaatacgcataactattttaaaacgagttaagagtttaagcttaagattttatccttaactgcttaattgggcacccactctacactagatatcaaagggcatttgggccagatttgtaagaatatgttcaacaggcgatactttgccaggctgagaaatcaaggtggccagatgttcagcagtgcatttgcaacccatgaacccagctctagagaagcattcatccctggaactgagactccctgaaaaagccatcctcccatggatcacaagggaatttccccaataccagctagaaacaatttaacgaagcccgaagcctgccgaattttcaggagatgagtgtcctgctctctcagacatactgttctgctatttttccctaaggacaaagtccctaaataaatccaaactgacttttatttgaaaagagcaagtgtagattggtatgtccaggaacttaagtcacaggagcaataaattctagcaccctgtttcctctaaacaaaggggcctgcaaaggactattggtatttacgaggactgcagaggcttgagtaagcattttcacagcagccctgtaaggttctaatgcacagcagtactactctatagccagcttattaaaccttaatggcactcttttagtgttgtacaccaggacggtagataactcacccacagcgtggcttctggaagctgccacagcactgcaaccattctgcaggttaccacccttcaacttgaaattcctagatactggtttcttcattaaaatcaggagtcagcaaaccaaggtgcttggccaaatctgacccactgcctctttttgcattgctattagtaaaggaggttttttacattttaaaacagttgacaagaaatcaaaaaagaataatattttgtgacatatgacaactatataaaattgacatttcactgtccataattaagttatattggcaagccaccacacccattcatttaaatattgtctagggctgtttttgtagtataacaggtagttgaggggttatgacagagacttatcaccccaaatcctacttcctggctctttggagaaaaagtttgatccctgatttgaaagtactatcagtcattttcatcctttaacaggttctgaaatgcattactatcaacttaaaggaagactccatgtcagcctctttaaccactggtcaaaatgaatcatttcccaacagtcagatccattgtccccacttaagaaaagcatgcaagagctctgggtgggctaagcaaggatcaagactaaaatagtacctttagaaagctctggagttgctccagcaacatatagctgaaaagtagtatcactgatatttttttcaaactaacataatagaacttgttctcttcaaaggagtaactttgaaatttgttgcaaagaatctgccaatgttcaaaacatatttggagtgcacctttgatgctgcctttagaggctctttttaaattatcttttaaacaatctcaataatgccaaatcttgattcattatacttgagcttgattcatatttttaatcttaagtcattcagaactacaatcagtgaataaaagggagaagtacattgcctggaatagatggcgacctcaataaatattagtgaaacgaattgagctggttcgatataaagtgacactaatgcaacttaaaggaataaaaacctactgaagacatacatatccatccattatctgtgcccctaagcgtacataccccaagtctttctgattctacatttagttttcaaatattgctggctttctgggaatctgcatgattttatctgattctccactgccttcttccattcccaagcctgcctcattgtcctgcatagaactcgtctcagcccctgcttgacatctgactgctcgctctggacttcagttgtcacatctcttttccatctctcagaccacttctgatcaacatgcccatatagttatatacaccagtgatagttctcggcccaaagtgcctttcatattcacatacttctctgagggaagtagtcataggtttccacatgcatgatatggcaagccttacatcatgctaccctgtccatgatagactacacggatgcatatcgaaggtagccctgcatagggaagaagcgggggagacagggatctatgaagctatgtagcaaatgcctaaaagaacaaaattcaatactgcttcgtagatccctgtctcccctgttttcccacagcagggctacctttacatggaactcaagtagaacttttcttaggaagacatgatacactggtataagtaaaggagaaaggaaggagacataggaaatgagcggtctgtagaaatacacactgctattagaaagagcagtgcaccctcagaaatcagtcaagacagaaaggtgagccacagaatgatgccttcctggaggcagggggagatagtaaacttgcgagttcaatgaatttgctataatatcccaagtagtgtaaccatgttctagttctttaggatgcctggctgtgtgactgcaaggaaggtttcctgtgttttctcacattcctatttttcacagtaacctaaatgggtctcttcattgtaacctgaataaatctgtattcacagaaatgaaagtggttttctgttcacttactaacttggctatgacttcaggagcagagaattctaaaactgctttgagtaacatcagtgtctgtgcactaagtgtatataatcccagatgacttactaaaagaaccaaattccaatgaaacctttggtaaacttttccaaatagagcttcatgactttaaagctgcttctactggatgtgtcaatttatggagtaaaataaagtaagagcaaaaaattaatttacaatactttagggaatgataagacagcctaaattgccaggtagttatctgtatagcagtgtacattgtgtctaagtcttattttttaggaattgctcaatgtttctgctatgcttaaacaaaaataacaaattatttatttacagtatctgaaaacagtaacaacagagacatttatagatttatgatactttgtattctgttataaaaataaaataaatcagaaatagcaaatagtaatttattcatttatgtgtttattaaaaaagcatttactatatgctaagaactgaagacaggttgtataaaatgacttctctgttctggtgaagttcattgtgaaggagaatgacacctaaatcagcgatacaacaaagcatcaaggagggacacctgatccagcctggggtggagaggaggtagagtttaggaaagattttctggagaaggaatggtatttgatccaaccctgaaggatgaggtacatcctgccttgttgggacaggctgatccatgttgtttgatgagtaaaatatcagaacttgctggccaaaggtgcatcatcactcatcactgaagacacaggaataatggatctgttttatttccagagttactttattaaaatactaaactctcctgggaaagtttaaattacaagtctgtccaggtaaaaccttatccctatcagtcgatggaggaacagacgagacagaataaagagggaagaggaatggtttcttaggaattactgtttggtccagccctggctatggacatgtaagaatttgatttgggcaaactatattaactattggaaacactctgtttgcatgttaaatgcctagaaaggatgaatcatacatatttcctatgttccattttctgactctgttctttttcctgtttctgctttctatgccctggccttcctccctaccctccattgagggtacaatagcatgtggtatcaattaatgttaagttttgaaacttaagtttcagtaaactttgggtcagcactacaaagaacatctttatatctacatcttttaaattcaacctttgattataaggaaccaagagagtttggataggtcaatgaaaatctatcccaagtcctacaaatgtgacacaaggtaaattttttatgaaagatcattagacaatattgttcatgttttctatttttcttctactcaatattaaatgggaatatcacaaaatattgaggaagagtaaataattgtttaatattaccatctttagcaaaaaaaatcatttactactgtaatctctgaatagaaggaatatgagcaataaaataaatctgaatttacactccaatattgttgaattcaatcttgttcaatcttgttctataaaacatctttcacaaatgtgggctctgaattttattttatcctgtcattgcttaatttaccagattctgaaccagtcttttgggacatttgcagactgatttctaaggcaatctgacaaaaataacttgaaatttcaatgaggatgaagaattgctctttaaagaatgaggaagtcagtaggcataagggaatttctcacaaaaccgcaatgcagaccacttcacaaataactgggaaaattctaaatttttactgcactgaaagacaattgggagagaggacaaaccactacttacctgtaaaagcttcaccagtttattacagtaatttccctagaattcaccctaaagttttttgaatagagcagcacctttaaatctgtcttaattatcagcatatgcaaaatatagaatgattgctttacaaaagccattactccagatgtgcagactaggtgaatttcctctgtgggcacggcatttctaggcagacaatgttaatattcactatgactatataaagatgaatggaatgcttaggtttcacgcctacttgataagtaatcattttagataaattatagattgattacatttaattacagaactacaatgctcatacagtattctaagcctttgtcacttatccatctgactctctacacaaaggaatccctgaaaggataagtgagagaagcaaatgcttcaaaagctacagatttcatgcaattgccacaagagttgtgaacaacatcttttttgttctttcttttttaaaatacagatcatggggatacgagtgcagatttgttaaatggatatattgtataatggttgggcttctagcgtgcccatcacctgaatagttcccagtgtctgtcacttccctctgcatatccatgtgtacccattgcttagcttctattattattattattatcattattattattacttgaactcctgggttcacacaattttcccacctcagcttcttgagtagttggaacaacaggcatgcactactggctggctatttttaaaatacatttgtagagacagaatctcactatgttgcccaggctggtcttgaactcctggcttcaaatgattctcccacctcagactctgaaagtgctgggattacaggtattagccacgctgctcagccagctgccacttataagtgagaacatgcagtatgaattttctgtttctgagttacttagaatattggcctccacctccatctatgttgctgtaaaagacacagtttctttctttctttttttttttttttttttgagatggagtctcgctctttcatccaggctggagtgcagtggcacaaccctggctcactgcaacctccgtctcccgggttcaagcaattctactgcctcaggctcccaagtagctgggactacagatgagtgccaccacacccagctaattattttgtatttttattttttagtagagatgggtttcaccataatggtcaggctggtctcaaactcccgaccttgtgatgcacccgcctcagcctcccaaagtgctgggattacaggcgtgagccaccgcacccggctggtttgattctttttaatggctgtatagtattctgtggtgtacatgtaccatatatttttattcagtcacctattgatggacacttaggttgattatgtggttaacatcttcgatgatgaagaaccatggagttggcaatttggctatgaatacaaataagaagtagtgctcatcaggtaactatagcttgcttttttaattcacagaactacctttaaatatattttattgcctgtaccttacaagcatcagaactaaagctcataaagattataggtaacttgtacaaagctaacaggttgagaatccaagttcaaaaaaagctttactactttgtcataggaaattactatggacttcaccctaaagttaattcagctctgccctatttcaacgtttgcattctcttttcactctgccataatatttcacaacagaagtctcaagtgtaaagactcaagagaaacaccgggtggtaatttaatcaagacaaagttcctgggataactgtttatattaaaataattaaaactctaaaactctaaagtgtaatgaccatacaggtgatataaaatgtgcagctgagtagagaagagagatgtaacttttttcttagtgttgaggaagtctttccaaagagataattttaaaatgggttttaaaggatgcataggagttcaaccatgtataagggcaacatgggtgacctgagcaaaggattagataaaacaaaatccgggcacttgacatgctcagggatcaaatagtccaatgtggctcagggtttgtatcctccttaccttcctctttttgtgatcagcacatctcaatattttagctttccctaatcggcttaattttaatattaaaatattcaatattaatattaagattaataaaaagacaaaattttgaaatgacagcaaattcaatgatgaaattgccgtaagtgctaaagcaccaaagaactaaactaaaaacagttgcacctcttcttggctccctttcttcagggtcccaatatctttaccactgaaaattatttttttaaggcacagatttttcaggaaggaaaggaataaaattaacacaaattgaatagaaatatgaatagttcaaaattagacttttactctcttttagactttctaattccaagcaacactatccgacaggttatgatgcctcagtttgatgacagcttttttcttgaacacttgccaggatgaggaaacccagggaaattttcatgaaagacctcctaaaaattatgtgaaaattcaggcaagtatttgaggcccctgctagacttttttagtacatctgtaaatttacagattttttttttttatagaacaagcaaaatcaccaacttaaaacatccatgaacctgaacaagatattttatccaccacttctttccttcccaagagggagattctctctaatctcaggaaacaaatattttcctattgtgtggttcctcagacctggcttttgaaatttctgctaagtacacagttgtaatcatttattacataatctatttctaatgtcttattctacacataatgtttgtgaaatgcatgtagcttagttgtctgtggatatattccttgcctcttgcaagattcttaaaacagatttttatgattaataggtgtctctgttgctaacctcaagtcactcaaactctccttttgaaatgaacatttatttcagatagtacatgctctctgcggatagcctgtccacttttcaaatgtaatgtcctgtcttccatagatacgaaattttcaaaagatattggcataatgcaggagaaaatgccatccttttattatgttcaaaattgatctgacccctgaggtagcactttggggaattgggctacataatcatgtagaccctttcaggaaatggcttatttatggatttattttttatatacagaagatttcacacttctggctttatacaattgcatcctctcttcctttccaatatgtttccaaagtaggaaagctatatatggcaggagaactgaatttctatatcagctagaaatctgtcatctgctatatattggctctaatgataatgctttaagaatacatttatcccatatatgcatccagtcctctccagcagaacttttgcagttctcatttactgaataaagtaatgctaaagatagtgctatatcctggtcattgtccaatttttttttttttttaaaactgacttctaaatttattttttaaatgtctttttccccctgaagaattgatgtattttacactcttagataataaaagtttagtaagtctgcatgtgttttttctcactgcttagtttacatttagtaggtcatctttattgtattaaaatttaaggaaataaatcatattaagtacatattaaaaacatagtataaatatcaagcccttgttttgtctgaactttttattattcaaattgttctttatttttaaaagttaaaggaagaaatgtagttaatctgtatatccacataaagcaacacaagtagtccaactaaacccgctgatcttggttccagtcctttcgaaatggctatgttttaaataaaacctatttccttaggctaacaaacagtctataatccattaagtctttatgaacaaatccaaggcttttgaaattagtgcttggggaagaaagagtcaagtaatgaatttcaaagaattatgaaggtgattaaagaggaacaaaggatcaaactcccatcaccatgatttctagaacagagcctatcaaatgggcatttgggaattttatttatcatctaatcctgaatatgaaatagaaggtagagggaagaaggcaagaaacagtgttaatttagaaaggaggtgggatagagaaatagaaaaaagaatatgagagcaatttttctttaatggacatttgtaagctaaagagcaaccaggaaaaggtaataatactgacaaaaagagccgttgtttctgaagtttcaaaatgtcattttaactttttaagctggactgagtaaattgggtaagaccaccctgatcctagtgatgccagagatatcttagttacaaacaatggtttgagttatacttgttgtcacagaactgaaaattgcaaaactaattttctcttatgtactcaagtgtactatggaaaaacagagatactacaaagccaccaactccagtgggaaagtcatctctgtgctggctccaggagggtttatctgtggcagagacttaaaattgtcccattaataagctttctcattggcttccctgtctaggcagaattctgagctggccacaaggccatacaatataaagaaggaatttttcagtctcccttgcagctaagtgtgaccatgtgactaactctggccaataggatgtgagcagacgtgatgaggtccacttctaagccatgctcttaaaggggaatgtggtctttccctatgagaatggccatcttgtttttgtttttgttttgagacagagtcttgctctgtcacccaggctggagtgcaatggcactatcttggctcactgcaatctccgcctcccaggttctagcgattatcctgcctcagcctcctgagtagccgggattacaggcgcctggcaccacgcctggctaatttttgtctttgtattagagagggggtttcaccatgttggccaggctggtctcgaactcctgacctcaggtgatccacccttcttggcttcccaaagtgttgggattacaagcatgagccaccacgatcagctgagtagccatctttgaccaagcagataaggatgcctcatagggttagtgaacaaaaatacaaaaagagctggaactcctaaaaattctccagaaaagagccatctcacttgttcagatctggttattcagactctacatgagaagttagatgtaaacttctattttgcttaaatcatttaaatttcagcctcttttcctgcatcagaacttttacaataatagcaaacacactatagcccttaccatgtgccaggcagtgtcctgagtgcttttactatattaactcattacataagactataatttaaaacataacattattatttgtgtctacagacacagaattcaagcactgagaggttatatggttgatccagggtctgaatccagaaaatctgactccagagtccatatacttggtcataccatttagcacaacatcatacatttaacatatattaagggaacatttgtttaataagttaacaggtaatctgtctgtttaaaattgcataactgtgtttagaagtctcaacatcaacagattttttatgtgatctctgattttcttcttcaacaagggaaaagtcatcaatttagatggtaagcaatgtcctgtagggtactctgtaccctgcaaccttttatgtagccagtttctagcatctctgagaataccctggcatgtcagctactgctgagcaaagatgtgctctgacaatacaggaacacaagagaattgaaaaggagcacagatgaacagcatgaagaatcaagatgaggcccattgcctatttgttttccattctattagcatggtgcctactaagtgccagggaccaaatgtttggtgacagtggaagaggtatacaaatgaatgagacattctttccctcaaagaattaaaatccagcctcctttgagtacaaagtctttccaaagatctcttttgtgttcttcccttaactaataggcctctcgaggataagtcccagcaaatcatttttcagtggaatggaaaaaggggaatactgacaaacatgaagaaatatttttttaaaaaatttcttttaagaaccagaagttgttggggcaatgaagatatgtaggaaaaaaaatgagaaaaaaatataatgaagttagttttgaaactaagttttgtggcaattttatgacaaagattagggccatctctttgagatttttttcttctttccccaagtatcaaggaatgaatccttgaagtttcttttttgcagagatttaagttttcaacttttcaataatgaatagccactttgctttagataactttaattaaagtttcataaatgcaccaagagccatagggctttttgtattcttgaaataatgaataatttaatcaattaatacataatgggagcaaatgactaattgcagattcaagatacattttgtcaatcatctttattgacagttatagattacaaagtccaccataccaaaagtcaagaatgccttgattgacaattaattgctaagaccaattccattatcatgacttctgccctctattttccaatttggaaagcgtgttgcagtttcgatttatacactgggaagttgtattagtatcaactttagctcttatataaatgtggcattttaaaataaacattctcccaaattaatactttgtttctgcaaacatgagcaccaagcacatggctgaaaacatctttcattacgctagtttcaagaaaaaacactccttttcactgaaatttaatttgtaagacatttagggtatccctacactatatttttaattgaattttaaaggaaggatggagaaataacagttccgaatttgttggatatttattattttgaaaaataaatctgcattcatttatttgccatagtctaccaggccatccatccatccatccatccatccacccatccatctattcatttgttcatccatcaacgcatacatagatactttatcttttaagagtcaaaaaaaagtttttgaactaaagtccaaaaggaccttccgaactcagtctgcctagaacaccacgcttgagtcaaaaattctggaaatgtgttgctgtaaactcatcttctcatctggatctcattggagtaacataatccacattttcttcttttaagcatatacaaccccagaacacatccaatttgttcacagctatctgcataattaatcagtagtctttaggttcactccacacttaaattttcacatatctatgcatgcattggatacatacctcacaggatataatttctggacaaaagaatgttacttagaatgatgagcgtctgataaaactatggctatgctctcaatatcaagacagtttggctggtatggaacagacaaattaattgaaactcatgtaagttttattaatcacatttcagagtggccacatttctcttctttggctttatagtctttacagccaacttaagtcattatcatgcattactcatgacttgtgtatcatgtctatatacttccacacttggttatccctctgattgagagcactttgaaatcagtccctaaacactctgtgttataaatattctctgtaaacctttcatgtgtatttgcatgtaaataatgaaatatttgataagcagaatacaccacaaaaaattacatcaagacaaaatttattgaaaagcatcctgatttttgtcgttaaaactcataaaactagagcttaatcacctctagattctttttacaaaagttaggtaaaaacaatttccatttacattttttctacttactatcctatgacctacatagttcagcataattaataactggaaatttttgacctcctctgtgtatttgcaaaatgtaatattcccaagtataccttagcagagtcttctgtggcaaaaaaatattcactaagaattataatctagaaagcctttgtctatctatatagcttcagacaaaatagcattttatagatcataatggtaatgtaaacattcataacttaccccaattagctgaaagtcttgacatataagattacagccatagatcgatgaagatgcagcagaaaaggtatggcatatttagaaggctagttacactcatcataacaacagaaactaaaatatgtattcttttggttatctattctgggcacaccgaaataaattgtgaaccaaaccctataaagacaaacccaaaatgtacccagaactgtgcacattaggtaaatttttattagaatacaataggaattgaggacaatgcggtcttattaaataaactattaataaaaaggctgaaagggttgaagattttctgggctctctggagatttgaactatctttgattaaatgtgagctaaaaatactccagatatcaaaaacaaaaacttgtagtggtagcaacgaactataggtatatgtagtacttattcattccataccacaataattcaaaaattcctaggagccagctaatcccttttcagcatttgtgctcagggacttcttcactttttatagctgggtaatatataaacacaaatgtccctcctttttacttgaaccccagaggaaagcagttttacagagctatggaagcagatcttattaattaaagtctattttttgttcctctaaatttatcttttactatcagtgtgttgtgtgctaaggaatggattctaagacttatgaaatgggaagcatctatcacagtgttcaatgcatgctaaataaatgttcatcctccattaatataaaggtactcactgagaccgagtgtggtggctcacgctataatcccagcactttgagaggccaaggtgggcggatcagaaggtcaggagttcgagaccagcctggccaacatgttgaaaccccgtgtctactaaaaatacaaaaatcagccgggtgtggtggcgggtgcctgtaatcccagctactcgggaggctcaggcaggggaattgcttgaacgtgggaggcagagggtgtagtgagccaagattgctccactgcactccagcctgggtgacagagccagactgtcttgtagggggtgggatggggcggaaaaggtactcactagtttattaacttggtaaaattaaattgtatccacattaccagcaggcaaaacaagtgaagacttttaaaaaatgattttacagactcaagggctgattccttttcagaaacagaaacgagttacagagctttcaacttttatttatataatattatccccgtaaggtttaaccaagaagataaagtagatgtgattggcaaatcttttaaaacttgatgtacaaatgtttgttaaatatccagggtcctaaaaatcaaatagccatttaattttgtaaacatgtttttaatatagtcttgtaattccaatgatgatccaataactagatttaaaatttaaaaattcagtaaacacataccagaaacaagaaaaattttatttgttaaatttaagatttaagtcacaatttcaggccaatggattcaaaatactttaaatcttaacttgagtcattaacaattaatactaaatatccaatgccccaaatctcctttggtcctagattagctgatgacaaatgacaagttgattgctaataagcatagatcacaattttatgagaaagtctatttgtggcttgatattctcattaatattatcaaagtccacacttccaaaaattcaaattgcttttctgtaagaaacacaagacagagtctgctctaaattggtattcccaatgttcctgcccttgggagttataaagaaggtaaaaagctatcccttcttttccctgccaattctccgtccttccatgtgagaacagactttcagaaaataacattttccttctttcatgatcaatttagccctaccttattttttcttggctgaattggcccccacctgttgcctcctggttttgttaattaaaatgagacaagtgaaaagcactgacaacctagaccttgtgtgattattaaagaatgacaggtgctttggaaatcaaacctaacaccaaacataaagaagcctttagacctctatcttacaagataattacattaatcagtgaaaaactagattaatctattggggagttaagtaactgaaaatgggacaccctaaaaaattacttggtacaaaataagaaacaaatgtcagtgaattcattgagtagtctgggacttctttttaagtcactatggtattggtcttttactaataaaatagatgacttattaaagcaatatttacactgattaattcacaacggcagtacctgagacccctaagaaaacaactattcctttaaaatccagcctgaaagtagtgctcaggtgtacacactgagccttttgtctttaacttagcaaacactcagttcaaaaataattttgtcattcagaggagaagctattttatagataaaagattatgaatttcacagctgacttgagctctactcaggtcaacaacattggtttctactttgcaagtaggatttgttctgtcaatgcagatttctcagtaagtactttcccctttcaaagaaacatttacatttttttatataaatcaagtcactgattatattagctcagattcacatttgatgcacccttgtgcccctcctcctacacttcagctaaaatggaaacagactttgtttctaacttttaatactgacatttttgagtgtaatcaaaattccagagtgttggcttagatggagttctaaactgaagaaaggagtaagggctaaggtggctttttgtttttgttgtatgtattttcctattttataaatagttcttcagtttcctgtatgatactaacaatatgcatgtcatatattaaacaatatatgcattaaaaatgaggaactgtctgccctaatatgagcatttttttgtgagttttgttttgtttttttctgagatggagtcttgctctgttgcccaggctggagtgcagtggcgtgatcttggcttactgcaacctctgcctcccgggttcaagcaattctcctgcctcagcctcctgagcatctgggactacaggtgtgcaccaccacgcccagctaatttttgtatttttagtagagacggagttttacattttggccaggctggtctcgaactcctgacctcgtgattcacccacctcagcctcccaaagtgctgggatcacaggtgtgagccactgcacccggcctcttccttttatttagtttatgatttatccttattatatattttgaaagcttagagacatgtcaaattaggaaggatcaagaaggagcttaactttttgtagggggaggctctgattctgaatatctctaaagcctgaaaagcaatttaattagtcactaagtgggaaggctccatttgatgacaggctgtaaatggcattactcttggtcatctgagtagaatgcagaaaggttgcaaatgaaatggtaatggatttaattgcttattctgatattcataaaaatctgagatgtttctcaagccctgtttagactctaaacaattttatttttccttatattaataattagtgatcaggtcgaatacactgaagccttgtctatgtaaaaacaccatcaagtgactattttcatgactcctgacttactctcaactgcctccataatgactttatttaaaccatgatccattgaaatgactcatgaatttcagaggttccctttatcttttccgtggatttatacccaaagctctggaatagttgtatgaacactagaaaaaaagaaacagaaatgacaggttccaggtaatcaatgataaaactactttgaaaaccaagaagaaataatttcatttatggagttttatgagcactgtatttaagctgacattcaacttttaaaaattgtacgtatttaatgtgtacaacatgatgttttgacatatgtaatgaaatatttactgcagtcaagcaaattaacataaccatctagtcacagtcacagttaccagttacggttacctttttttgttgttgttgttggtagggagagaacttgtctcctgactactgtcttagcagttttcagtgtacaatataatatcattaactttaataatcaagctgtacattagatcactagacttatcctgaaaaacgtcaattgtgtatacttttactaatatctctccatctccccccacctccctgaccctgctaactacctttctactgtttctatatattcaattttttaaattattttttattttttacgtttttagagtcagagtgttactcttttgcccaggctggagtgcagtggtgctccttgcttactgctgccttgaatttctgggctcaggcagtcttcctgcctcagcctcccaagcaactaggactacaggcacatgccgcaacttccacgtaagtttttatttttttttaattttttatttttttccagttttttgagatgggagtcttgctatgttgcccaggcagctgtctaacgcctggcatcaagggatccttccacctcagcctcccaagtcttcaggagtacaggcttgagctactactacaatcagtgtattaaacatttttagattccacatgtaagtgagaccatgcaatatttttctttctgcgtccggcttatttcacttagtgttacgctttccagacattcattttcattgacaggcatcatacatgatgctaaagagcatggtagacagggagtcagacagatttgggttaatgatctgagcccaccactcatccaacgatgtgacctttaaatgggttaatttatcctagtcttgtgttcctcagctaaaaaatggggataggttgataatcgttaaggttttgtaagggttaaacgagacatgtttgtaaagcacttaatgaggtcagacacgcaggagctgcccagtaaatattagctacaaatttaggacctaacataaagggatctctcaagaaaatcactgaatgcaaagacaagtattttcttaatactttacagctgagtatttgatccaaggttctttcccatttatagatttgttatttgatgcatttcattttactttttatgcagatgggttggttagcccggcctcagttatcatttgaaactcaaaagggcagaatgtaaaacaagatattcttatgattccaaattgaaaaatacacaaacatcaatgtcttcaaaactatagagtttttactaggacacagtttttcctctaacttgatgaaaaatcaggagttctggcttccattggtatctctgacactaattaattgtgaaggccttggtctcctttatttgggatatgagagttttgacaaaatgacctcttaggtcccttcagtatgtctgaaaactaattcagaatgtaaccctaatgccgtttgtgaggaaaataaaagagacttttcccctgtatgtcataaatcccaacctgtgacaagttcttcacatgtgtaaaattctgtcctggttttctatggcagtccccatgatggaaactcttttagttatgcataaaatcaggccagtttatcacccagaaaaggaagagaggcgacatgcttccagcctatatcgtctagactaattttcttgttctctctgatgccactatgggacccttgccagctgcctcctaggaaataattattaattgcacttactcaaattagcctcctcctaagtccccttcaagatcacactacagagatgtcctgagagcctagcggaagcagagaaactaaaaaaaatgttcacaatctttcttcttccaaagaggttcctgcaaatagactcatgattaaaatggacctcataacatgtcagcttcttggaatggaccctccttccaaggctagaggcctgaggattgcttctaaataaaagaaagcttgctatgttttcagttccagatggtatatgtgcactaatagacagcaaattctaaaacgacatgcctctggcttcatcctggagtctcagaagcagagaagaaatgcattagaaaaggaaagagagagtatcttgctcttgtttgtgttgggatataccaaggcaacatttcaggcagcttacactgctcatagattattttgatcaaaattgttattgctcacttctttcatttcttggataagttaactgaccacttggaaccattccccttaaaatgggtaacaggaaatcctaggtcctctaactctcagcacatattcatagaaaaccaaagttgcaatactgtaaaaggagcagaaataactaactacaattcaatatatttcattcagaacgaggctttgaaaaaagcaatgatcctttgtgcccagggctgctcaatttgattactgcatcccctactttgtgaagtgatattttgtttctattttgattccaaactgctcaaatagagtcctcctcaggcaagtgtataagaatatagcatattttggcctcaaatgactcttattaaagaataataaatcaatttaaacattattattacttcaaaaatcaaatctgtaacaaatattaatcaatctgatacttctactgttattggagaacatttagtctataaactacattatggatgtcatggtcccatttcttaaaatatgtctaggtatatgcttatactgatgcataattagatatgtttatatcatatatatactgattcaacagaggagaaaatattcgtgaagacgagattaacacagcagacagaaagcatcacatcttaccttataagactgcatttataattaccatgtggtagaataatggatgatctttttcattattatgtttcttaataattttcaaattaaaatatttgaagaaaacaaatgcaatatcctataatttgtataacataaattccattttttccctagataatggcaaaggccgcatgactattaaaactttagataagtatgtacatatacacacaaagtagccttttttattttaatgtgggagaaataagctaagaagagtaatgctatctattcttctattagatagggttttatataatacatgcttacaaaaggatcatgttgtcaagggtacctcgtcttctctttaaaacaaaactaatttcaaaggttgcttaatcaaatcacaatgaagtttcatacttttcaatttaacaaaatatcacagaaaagcatgcatcatagaaaatcatatcttcctagataatgaatttccaacaggtaattttggagagtctctatttataagctaagaatgatgatttgaatatttaaagatatgcactgctgacaaataggagtgtatttatggagtacaagttttagttatctaaggtttctaaatccccaggagctcaagaatgaagaaaccatgcactgataatccgaacctggatagatgaattctagacagcaacttgtgtactcccctcacagccacagaggtaggtggaatgtataatacattgtcttgtggaaatcataagctcaaaaggaccctagaattatcttcattgctatctcatgatgaccttttcataatatgcagccactgatcttcacgtctcaaattataatagtcaataaagaatcactttatataaaaagtatttgacttatttcacttatttgaattccagggtagggagactgtttgcagggatatttagcttagctttcaaactatctgtggttcctaactgtcacaacattcaggagtatcctaaatatataatgaaatgtctgtaaacctaaataaatgttagtataaataataaatacctacacaattggaggaatagtgtcatattgaggaattaagtcaaaatggtttaatcatgaaaagctatggtagacactggggaatgaatggcaaaaataacagaatatagttagtgtccctcctggctttgagtaatatatgctgatgtaaaaatttttgattgttagtgttaaccactgtatttattcactaatctgtaaatttgacacaatggatttattaatgtaatttaatttacttggcatttcttctcctgagaaagactcctaatagatttaccctttaccagtccaaccaaattatgagatttctcccctatttctacctcacaggaggaacctggatatgcatagattcaggatcttagttttttacttttaatgaagaattatgctattggaagttgaacaaagatatgcagagttggaggacagtcatagtatgcaggggttaaaaaaagaaaacaattttgcaggcacttgatgtgggcatgacggtggtgtgtctatgagatggctgttctttgtgggtttttttttttcttttaatcttgggaaactttgcagtttttacacatgttcatagaaccatgatctaaatttcaatatagctagttttgacagtgcttttacattttcaacgcatttttattttcccctctgacaattcagcttattctattaagtgtacttccaacctctctctctccaggctctcatcctacacacatgttaaacctgaggtatgttttggaagtaggggatctcagacagtccatctgattttttgtcacatcctctcatctagtcactagaaaatgcttctatcagatttgtgtcataggtaagccaaatacatatgttgcaatttcagctacttcatttatcaccagctaaaaataaacaaaaacaaacaatggtaaaattaaaccaccctccatttcctgatcatataattttaagttttgatagaggcaggcagtgcttgagcactacataagcaacttgttagggcatgccacagaattctgatggagttcttggggctttcttgggagtcacttccttagaaagagagaatggaacatagatggctgtagacactaataatatatatcaagaaataagttaaagtatataacaacattatatatgggtaaatgctacaaaaaataaatcaagaagagagtgatatttctatgggaagatttaggtcaggaatttttttctgatgaagtcgactttgaatagagctccaaaactatagtacatattctaatatgtctagaattatctcatcagtatctattaatcaaggatggtgaataactacagtctcattctttttgccttatattctgctcactcttacttccctagttcccaccctaagctctcacgattatactattatgatttgattcttcactgacactaatattgctcctctgagtgcctaggatgagtgtttatttagtttatttatgcatttatgatgctcttgagtattttgacaatcaggaaccacagaaatgtgaggaaagccaagccaaatgcacttcaagcagtctccctgccatgaaagctgtgagccctgaagtcatttacctgataatctgttctatgggtgctagcaagcattagaccccgtagacatgtggtgctggggaggctgtaagccaaggaatctgggcaggtataacaggaaccgaagacttaagcagaaagctgacaagaacaccataccgctacttctctgaggtcaccaacagcatctcagtccaagagtagccagacccattaaacaaaagcataaatgatgggaatcagatccttttttggaagacatcaggattgctaggatatttagtgtctttagggaagaaaaagtatgaagaaaggcagctaaggacactggagacaaatgtctcgtgttttcatgattttacttgttaactttccactcggcagacagaatctgggcacagggactttgcctgcagctgtcatggggagctctgctgtaaatatattagcatataagcacagtatacaaggaatttgttagtctgacagcacataatgtagtttaatcaatataattattgaaaaaaataatttacacacaattgctcattcactcgagtatctgggaacctcaaagagaaaaagaaatggtttttctatgctgaagatgagagcttcagaataggtagattctggttgtaaggcagtcttaatcttaataatggaagatcttaatctttgatggtagacgctagtcctcctctcacataaatactgaggaatgctaagaaatgctagtttctgcagacatctttcctgcttcaaaaagacaagcttcactttgatctgtttcccatgtggactctgtatgatttctttcagagggggaaaaatgaagagagtcctgccactttaaaaaacaaaaacaacatgaaacaaacaaaacacctctctctaaaatctctagaaaacactccatccggcctttccctttcctcctcagctcaaatcagaagcaactcaccacaattaaaacaaagagtttccttctcatctttcatcactcaaaaggccagaagagctctaatccctcagagaaaaaaaaatcattccatataattatgggtgcattgacatcaatgattttctgagtttattttttaaatgccattgtttggtaaatgccatttctaaaatgtcattatttttttaatgccactaaaccacattaagagtggtttagtagcattgaagtgcaaatgaaaaaaaagaatatattttttgtaaatttaagagagtaagaataaaaggttcttaggactgtatactctccataagaatcatgaagagtaatgccgaagatcagagaaaactaaccagtatttataatgatgttcacttctattgtggcctgagccttggggtgtttggagcaatttttcaacccttctgagccttatttttctcacttttaaaatgagggtgttaaaggcaggtgatctcaacatcttttcccaacttacccagctttggatttttttttctggttataaaattattctgattattttttcttagaaaaaatatagataggaaaatgtatatttctgttaattctaccactcacagataaccagttcggtgtatattcttctaggtaatgcttgggttctttttttaaaagccataacgaccacaataaacacagtagaatctcttttctgctttatctctctgaagaatatgtgagcttttttttccccctgttttagtatttaagtgcttaacaattgaggttctggcaactaaaactgcacaggcagcagctccgtttttctcagaatcaagcgaaactgaacaggcaattaaaagttactgaactgcaaggtaaaattacttccctgctatgcttctgggtgactaaagaagggagacaatggaaaccatatttagaattaagatagaaggatggaacatagcagtctgctctactaaaatggaatctataagcattacacataatcagcagcacttcaatcatgctctttgctcacagttacatggaagattacacaaaacaaatgtgcaatattcaaatctgtggcattgctggttaacagaaggcacttctctcccagcccacacggtgatccaaattgtctcctgtacagtcagtgcccatctcacaaatgggctatgctccaagcatctacttgtaagctcattgttccattctctgtattaagtttctcatagaattaatgttataaattgtcctcagattcctaggctagcctatatgggccagcttattaaaaggcacattatcaaaaaataacatcaagaagactatgcaaattaaccaccatagtaatgcttcttttgaagttgtattcagaggtcaattgtggaagcacaagaatagctctcctcttctgaaaattactggtgacagtttccatccttagagacaaatggtaagacagaagaataaagtttaaagaatttcgggaattcaatcaggaggattcagggccagagatcaaggaaaaggattcacattgaactgggaaagcagtaaacggcatgagatgaaggagttggtagtatgcctgataatgcttaagaaaggagaaaatgattacagtatggagaaacagagccttcttctagggtatcttcccatgactttgagctcttatcttagttagaagcttggaggctataatatctggatgtcatctgttttccacactcagtagaaatgttgggggaagaggatttggtgaactggggtaaagataaaaatgagcagtggaagtctggggaagtattaagacatttccattccaactgaaaccttatgtctatcacctctccctccactgaggactctacctggtgacttgtattgggaatagttaagatgcctggaaaatgcagtggatcttgaaatgataatttcaaacatttaatagggtagctcaaacatcaaacaacaatgaaaataaataggaatgtggaagtcaagcaacggaagatcttgccacatgcaaccagtatagccatttgcacaataagaatcacattaaattggattaagcaatctgtgagaatctccttaggataatatttttacataacaagggaatcaacaaagcagattttataactgatgtcatgtaataaaatatgaaacccactcttaaaggttatgattctattggtacagttaagtataaatctgctggagatagtaaggtagtaagattaataagtaacaaacacatgttctgctataaaggtcacttttgatttaatgagaaatacaaatttgccgaaaatatgtcttccttctttaggaggggatggtggtactaaaatttaataaaatagggtaaaaaaatgtcaaaatatcaatcagaaaacctaaggtgaactgaaagcagttactgtggagtacagtatctactatgagatttcttttaggtaacttttttatgtcgtccaacctcaattatcaattttcctcaaaattacaattcgaaaataccaaaagaaaaaataataactgtttttgggatccacgaggacattattaaagagtattttggagttatatttgctgccaatatcatgtactgaatgttcagagaaatattttctgctctgcgtttaaaaatgacaaataactatgaaagacatgttactagacatggaggagataatcaaaagaccaaaatacatgtaatcactgttccagaaggagaggggaaagagaatggacaaaagactcacaattctacataattgattaattagacaaatcctaatatcaggaagcccagtgaatccaaagcaagaataataaaaagaaacccttaccaagacagacagacacatgagcaagaaataattgaaaatgcaaggaaagagatctttaaaacagtcaggaagaatgaaacagtagttagaaataaatgataactagatttacaactaacttttcaacacttacaatggaagctagagggcaatgggataatatctccaaaatataagagacaacagctgttctattacaattgctatacccagtggaaaaaaaaattcaaaatgaggttaaaataaagctatttcaaacaattaaaaaatgaaagaatgtactaacaaaagaccttcacgaatgaaacatctaaataatgtatataaaacaaaggaaaataatcacagaaaaaaacgtctaagatgaaagaagaaaagtaaaaccatggcaaacatctcagtaaatctaaagaaagccttactttgtaaaaatattaacagtgtttaatttatagagttcatacaacaaaagtcaaagccaccaacaacatgtcattccaaaaagatcatgaaaggaattgaaacattcaaaggtccttttattgtctgagaggaaaatattagttaacattagatgttgtaacctcagctattcatgttttatatttaatgatttcaaggtagaggtagaaaagtatatcttaaacaggatattaaaatacaaactataaagggaaatactgataatttaactatatcaaattttagaactccattcaccaaaatataccataaaaagactgaaaattccagtcacatactagaagaataaacataacaaaatataatgaattctaagcatcaataaagaaatgataaataatctaataggaaaaaaatggactaaaaatgtgaacagatatttcacagaaggggaaacacaaataacccagaaacatatgaagacatgtacaacatcattagtaatcaggagaattcaaattaaatcacaatgaaataccattgtacaatcaccgcactggcaaaaaatttaaaagtttagatgagaacacagagcaataggaagtcatcatcccccagtggacagcaggtgaatggtaagtaattttactaggaacgttacatgtgcatcctgtatgcattatatgtactgcaacaatactgctcctgagtctatgccctagagaaattcttgtgcatgatccagagtcacatgaaacagggttcaaggagcactgtttgtaagagcaaacactcaaaaccacccaaatatccatgagcatagagtgggttacaatattgtgattttttttcactcagtagaatgatacacagtggtaagaatgattaaattaaatgctataataaaccccaaacaagtttgacagacaaaaatgaaggaataaaactactattattccatttatataaaattcaaaaacaggcaaaagtaaacagtatatcatttactgatacatgcatatatgataaaactattttaaaaagtaagaagattataaacacaaaattcagaaggtagctagctatctcaggataaataagaggggcatacacagtgcttcagataggtactgctgtatttatgtcatgtgctggccacaaagtttttcaatttttaattacattttagtagacacacatgaattatataagttttaaaggtaaattattatcacaataaagaaatatttaatattgttaattgcagtttaataaacataataagtttaaattaagaagaaaagcttttcttttaaactaaatgtttaaaatttgggatttttattaaaaaatcacatttaaagaaacatggcaaaactggagtttaaatgggggttcttttctgagtcatatatttgcatagtgtcagtggaataataatgactctagttattctgactgaaagttgaaaatgtttgtttgtttaattattttagtttgtacttcatttttatagcattccctcacattaattatatattgtagttgcattatgcaaaatgaaaacaaataaagttagaaatactatgcttcataaaacgtagcataaagttacactggctgatactcacagtcatttgtatagccattgccttgaaatatactgatcacaagctcctttatctccaaaatgtctgaatgctgttaacatgagaaaaagacacctgactaacttgactgacctgcagcaaaattatttgttttcatcgaaaaggaaggtgccctcctctctgttactcacttttttcctttctgaactaatttctgagaaaattactcaattaatagcactaatttataaaattaattgtgtaatttgcctagattccaggcattcattagctctcatggaagcacctgtgtggagaaaactatcaggactctttggaaagaagacagtggcagacagtggcagacagtggcagacagtggcaccgtagcacctcaaataatgcaacaaagacccctacgcgagcttgcatcctgtcaaagaagctgttttctgctctattgaaatctttggcttcaagcactaacctcctctcatattcctttgtcccttaagctccaacttcactatgcaatcgtcctctctattcttgcctcctccagttctaactcaagtttcagtcttattagaaataggacatgctcactttggcaagacatggctccttttttacccagagggtaaagcactatagcaacaagaggtacacaggtaaaggacagtgttatcgaaacctaacatttccctaactatgcccaccctcactcctcatcagtgagcttctcctgtaacctggaccattccaaacactaacaatgactgagaagcaaaaagtttccacagccttctaacatcatcaattcaagtgcctaacaattctaatgagaagggtcttgaatgataatatttaaagctattttttcttattttatcagataaataatcaattttttaaaaaggtattcatttattcttatacctcaatcatatatatatatatatatatatatatatatatatatatatatatagtatatgattagcatcaggttagtctgggagtaggaatgggtttgtttgattaagaaataaaaaataagcatagtatcttactataaaaatgttatacttagaagagaatgtatacatttaaagagaattaaaatgaaaatgttttcatttctatatgttaatataatacagtgccaaacgatttggcaatggcattaagtgacacagaagttcaaagcacagacaaataccaatgtgagcaggagtcataaaggcttccaagaggaactagaaagagagctaggatttagggaattgatgaatggacaggagctaaaaacacagaggggaaggaggagggtatttctggcattggaaatcgaatatgaaattcagctcaagcatgtgaagataagtaggggctatgaccgtgaggtatggagggggctgatgccagtagctgctctgatgagaatatgaagagaagtaccacaaacactttgaagtctggctgtttcattcattgaactattggaatgtgcattgaatgccatctgattcaacagcaatggtttgtactcttctatcctctgataatttgctggcagcacacaccttctgtcatgccaaattactgcagcctgaaagttgtgtaggaaaatctgtggtggcaaattaagtccttgccatcctgaaagaatccaggcattcaggattgattattaacaactggaaagctgaggaagcaaagagaaaatcatcaccgtctacagccaaagtcccaaagccagtaaccatatagatattaacattaggtagcctcactggaacaaaagcattctttggtctctaaccacatataattcagagagatagcacagtatgcagaaaaaccagactaagtatcctggaatgcatgactctacaccaaagcgatatataaagtatccagagatacctagtatgacactgtcactggtccaacacattgtctgtattcctaaatctaagaaatcatagaactaacagggattatgttgttgaatgcagtatgtcccattagaacaaggagtgaagtgatattcactcactgggagaaataaactgcagttcgtgtctaagatatagaaagattcaccttttccatcctatggaccagtaacataatgtatacctttgaactttaaagagtttaaacagtgcatagctttataaatttgtagtgagaatcagggagacataaagttacaaaatgaacatttttttttcctaagtagcagtacttttcgagaaacggaaggtattgaatattcactaccttttaaaagatagcaaatgagagaggcaaggtgctttttgtttggttttgttttaaattggggaaaatgacaaaaattagcagttattaacttcacttttcattagatttaatactatcttccattctacaatattgtataatatcccattctacattgcactccattctaataataataaaataataaaacaattaaccagaagtagctaactagtatctatgaaaatacttacatgccagatatgacattaaatgatctagaaacattatctcatttaatttttatatttactgtaatatgtattatctgcccattttgtagatgagaattagctgagttatcattgatgcttagattagcaaagtggtctacctgtgatcacagacgtaaaaaattacaacatcaaaaaaaaaaaaaaaaaacagtctgtcatgtgcacttcaagcctgaaatggattaaatctagggactaaacacctactacctggtcagatgttacaatcaaagaaggttcctggagacaagggctaactagaaggttaacacaaggaccacgaaggccaattcctttttatcaccttagctatgtaaccgtaggagttgcctcaaaacaatcatttataaaggtgagaacaaacaacaacaacaaaaacccagaaacctccaaatacttcgtgattggaagagtgctgttgtggggtatgagcaagctggttgcatttaataatctgaccatcaagaaccattctgttcacttctgtattaattacagtaaaatgtgtgtaatatatctgatccctagaagatacctttttaaaagtatgcaaacacattttaaacaaggaattgacaacaatgatttcttagacaaggaatttttcaggtgataactgttttagaatgatgctactctgtaagtatgaaagttctctaatctatcactagattggctaactaatgaggatgagtagagacagaatatgaatttaaatacgcattcattccttgccttcaccaagatttatttgtaaatcaatgttattttattttcccattagttatatttgaagtaattcattccaaatatagaaaataattaattcttgaaaaattaaattcaaaagctacaatttaaaaattaagtttcatggagttaagtattaaaagacattagtcctaaacacagtctattccttgacaccagtgttttctctgtaagccattctgtataataagccgactaacattctaacacctactctaaaatgatgatctctctcctaactgtaaaataattctagtattatttttcattattaactatgattttgaaaagttgaaatgatttagttgtatgacagtatatattagaatttagtggaatgtaagcataaaaaactatttaacaacgttcttctaagagtcagctcataggtcatatccttcataaaacttatcggaagctttcttccacccaattaacaaatccctgaggggtcaactgtaccctatatggttgttcagagtctgtcattccttgagtaatacattataatagtagctctaaaactttaacatacagcagaatcttctggagtgctggttaaactacaaattgcagagcctcacagtcagagttcctgatttatgaggtctgggtggaacaaaataatttgcatttctgtacaatcctaaggtgaagctgatgctgtcagtctggggaccacattttgagaaccactgctttcagagtgtttcattttcaaaaagtctgcctcccactatgagactagaaccactaaagagcagatatggtgcctagcatgttctaggcactcaatacatatttctgaatgaaagaatgcagaggcccctgcaatgtttggaggagaaccaaatgaaaaatgagaagactgacaacgcaagtttcgggaaataaactatatatatatatatatatataacttagcagattcaaattttatttaaaccactgtgaagtcaatactctgaccttacaaatggttcagtgaaaatcttttgatgtaaagaaaaatgcgaagagtttgaaattaatacttggtctaggttcctctaagtccttttccaaaatatgcctatgtgtatctgttcattaagcaaacatttactgaatatataccataagcaatcaagctagaaaacataggaaacgacaagttgaccaaagtattacttcattttaacaaaagtggatcaaacaagtattcatcatacaattctaggaaaggggggtaccaaccgccagaaacaagagatgttctagaaactcaaagtagttcactagtgaggattttgaggtaggtagcagatagggaatcacagaaagagctggaaaactacgtaaacatataaagctggcccgaggacgggaaggctttgaatgtaagactaaggaatttgaacttacttttgtaggggtgagaagaaagcaatacttagcaaaactaaacttcaggcagggtatatgcttgagtagaaggagactagaggcagaaggactagtgagaaagctactgaaatgttctccacagaggtcagagcgacctaaaccaggtggtagcattaggagtgaaacacacagaaggcaaaatcagcagttaggcaaccgattaaatgcatggcaagagagagaaaaatgaattaaatggaaaggttttgagccttaatgacccaataaatgaagatgccacttaaaagctaaagaagccaagatgatagagtcaatatacttaaagacaattaatcataaacttcagaagcactcacttgcaggaacttctatcagagccctgggttgggggaatcctagcagtgtgttcactttgccatatacatgtgtaaagtgtgtaagtcttttattttattttattttatttgtttatttatttgagacggagtctcgctctgtcgccaggttgaagtgcagtggcgcaatctcggctcattgcaagctccgcctcccgggttcacgccattctcctgcctcagcctcccgagtagctgggactgcaggcgcccgccatcgcgcccggctaagtgtgtaagtcatttctatcttgcctgcttaagcttctccttccactcctccaacatttccttagtcacactcacctcccaccagatggccctggagaggctgtggtcatttttatttaacttttggcattctttccttaattggaactccttgaattatattagctttaagccctgaaaaatctgaatctgaccctgcaagaatagtttctggttgtgaggaagctgtgctcagttgtattcttggactttgatgcactacccagaatttcaggtggaaaaagcccaccatgggtttaaaaatctagcagaacatttgggactggggaaatacatgaggatagttgatgaaattactcaagaagagaaaacagacagaggggagaagacctaacattaaatttctgtaccctgacatcaagaacaggaagaagaaactgagaaagaagaagaggatggaacaatcagaatggatgaaaacaacaataaaacaatgtagtccagtgacataaatgccaagggaagaatgaatcttaactaagtaaagatgtagactgttccctgtgctgaaaagaccagaaaagatgagtgctgatataaagccattcctatggattggtggtcactggaagggaagatatgaatagagggagaagtttgtcatgccccccaccaggtcccatggcggagctacaggacagtttttctaacctcccttagggggatggggactaaaatttgctgctgctctagtgacaagcagtttacatatccactggaatatcgtaagatggtaagctagtatgattgacattttacaaatgagaaaacgtgtccaaagtgacaccaccaaccagagctggaactcaaattccagattttcctaactccaagtctactgtcttattctcatggccaattttaatagcaatgtacctatctatcttcactattattaacagtattattcaaataattacctggaatttagaaacagaatagccttgtctaattttaggactgttttctgaggttccacttcaattagaaatgcacacattagaaaatgcacgctattgcttcagtaatattttatatgtttgtaaccctttatttaaaaattaatctgataacatttgtgaacatgttaaaaagctaaaatgtcagcactttacttttccttcttcacagtttctaatctgtagagcctaacaaaaaaatgattaacatttcaaaagaaaacaaggaaaaacctggtagaaatatatttagcagagaaagtttctaagtatgatctgttgtttgaatatattttttaaaaagaagttcaaagtaagcattttacttcttgcattcataaagtgtttatcagttttcatcaaaacaaagaaaataagacacgattttgtttttttcatttcatgggctgatttttcatattttaaaaatattttacgtttgtagtccaatattaatatttaacacatggattaatgtacatgtgctgaaagatgaattgaataaatgccaggaattattaacaagcaatttcaactaaaactataaaacaatttcagcaacaattaccttaagtgataaattttccttcaatttaagaaataattttatccctcagctgtttattgaaattattattttgtacttgctgtatctgaagacagcaaaagacttagcccatgtaaaagtagaaagtactttttcataagtattttaatttcttacgataacacttagctattaaataaaattgcgggctggcagctgtaggctcaggcatataatggaagagaaagatggaaataccaaaggggcaggtagtcatgagcaaggacctgaaactttgatatatttgaagttttcacctgcaaccttatcttcagtttggtagtaacactactatttagtgttacttgcttatagttgtttctatccattaacttgctttgttaccttttgctatgtatataattatattctatgtacataattatatagagttgatgctatcctaaacaatgctttaaagggtatattttgtaattcctaggctgttctttgctaagggacttcagctagagcacacctatggtgcaatttactgtgttgaaactaggcagaacatcaacaataaaatttggaacacaccttaggtatggctaaaattttttaaactgacaatactaagtgtaaacaaaaaaacagaaacactgtaattctcatatattatcagtggaagtttaaaatcatgcacccaccttgagaaactgtgggacaaagtctaacaaagttaaacaaaatcctgtttcctagcctttccacttttaatatatgctcaatagaaatgactattgtgtcccaactcatttaaaaatgcttataggtataatagccccaaactggaaacaaaccaaatgttcttccacatgagaataaataatcaaatcgtggtatatgcatacaatggaatatgactcagaaataaaaaataaccaaccaatgatacatacaacatggataaatttcaaaaatatgatgatccaaagaaaccagacacaaaacagaacattctttacaatcccatttatatcaacttcaggacagggaaaatcacttatgatgatagttatcagaatagcagctgggcagaggagaactgtgactaagacgtagcttgagagtcacttcctagaattacagaaatgccctgtgtatggatgtgggtagtaaacacatgtgggtatatataggttaaaattattccactgacttatacacttaaaaacttgcacaattgtattgtatttaaattatatttcattgttaaatagaagtcaaaaccaaagaaaaccttcatcatgcttctttttcttttttcttctccctccctccctccttccctcccttccttcctttcctcctttctttctttttttttgttttgacagagtctcgctctttcacccgggctgaagtgcagtggaaaaatctcagctcactgcaacctctgcctcccacgttcaagggattctcctgcttcagcctcctgagtagctgggattacaggcatgagccaccttgcctggctaatttttgtatttttagtagagacagggtttcaccaggttggccaggctggtcgcgaactcctgacctcaagtaatctcccgccttggcctcccaaaatgctgggattacaggtgtgagccactgtgcccggccacttctttttcttacatggccacttatttttcttctttttcttatattttttatatgtgtattctgattttcctcgtaggattttttgcttgttgaaatgaagcagttaagatgtgactaatacaacagagagcatcttgaaaagaatgacatcatatagcaagcctgtccaatctgcagcctgcatatgacctagggtggctttgaatgtggcccaacacacattcgtaaacttccttaaaacatgagatatttttgtaattttttttgttttttttttagttcatcagttattgttagtgctagtgtattttatgtgtggcccaagacaattcttcttccaatgtggcccagggaagccaaaagcatggacacccctgtatagcatgagtaaacacctcagcaccaaggctagtaacagaagagatgaatgacttaataacatttaattccctcactctcccttctccaggctgcagcattctcaagaatgaattggaaacttcggttgggtgtggtggctcacacctataatcccagcactttgggaggccgaagtgggtgaatcacgaggtcaggagttcgagaccagcctggccaacagggtgaaacccatctttacgaaaaatacaaaaaaaaatagctggcatagtggtgggcacctgtaatcccagctactcaggaggccgaggcaggaaaatcgtttgaaaccaggaggcagaggttgcagtgagccgagatcgtgtcactgaactccagcccaggcaacagagtgagactccatctcaaaaacaaaaacaaaaaaagaattggaaacttttcatttcctactaattccgtcaccgctataaacttctgtcacctctcctaaattccaaaacctcactatgctagtaagagcctcatgcacttgactcctgacccagaactgcttggtcaaccttctaacacatcttgtctcttgttatttcaagcacagttatctgagtagatgctagctcaataccccctgcctgtggaaatatattaaatgcctccacatacagaatcatctccaaggggtagaagataagaaggctagaaaagaagttaacaatagagaaaaataccaatagattgattacaggaaaatattacattcctaaacattaatagcaccataaacaaaattaaaaggtatgtaattaactgagaaaaaaatgttagcaatatatataaaaatactaaaaagggctaacaacatcaataaagaattcttgcaaatcaatgtgaataaaaggaacacatcactaggtaatgcaaggtaatgaacagataatttggtgaaatacaattggcaaatccacatgtgaagatgttcaaacgcagtagaagttaaaacagtgtaaaacagttaaaacgatgagggtttttttttcttataaaatgataaggactgaaaataataattgcaatctgggaggcccattgtgctggatagtacaggaggtagtataaagaaacatacagaggaggagaactcagtttggcagtgagtattaaaaatctaaaaataactataccttctaactcatttccacacttcgtacacaatacaaatatttagattaaactatcatatataacagtagtgtgtgtgtgtgtgtgtgtgtgtgtgtgtgtgtgtgtgtatatatatatatatatatatatatatatatatatatatatatatatatatatatatttttttttttcccccccgagacggagtctcactctgtcacccaggctacagtgcggtggagcaacctcggctcactgcaacctccacctcccaggttcgaatgattctccagcctcagtctcccgagtagctaggaatataggcatgtgccaccatgcccggctaatttttttaattttaatagagacagggtttcactatgttggccaggctggtcttgaaatcctgacctcgtgacccacccgcctcggcctccaaaagtgctgggattacaggcgtgagccactgcacccggccagtgtttataaaatttttaatggaaaaaaatctatctgtccaatatcaaaaagattggtaaaataagtgcagtctagatgatatgccacgtatctctaaatatttatattatagaaggaaattaatatcaacaaaagatgtgtatgatgccatattagtttttttaaaaaggttgcaatacagtctgcacagtaggcttctatttttttttaaatgattaaatacataaaggcaaactactaaaaggaatataccaaaattttaatagtgattttctttagatacgattctggatattctattttcgttctcaaacttctgttttccaaatcttctatagcgataattataatcactaataaccaatgttatcgaaaatttccatgatctctaaatgccttaaagagttcgacagaaagaatttaaaaacataggctctcctttttcttctttcattagtgatgatgggctattaaaacaaggccacgtccttttgctttaacctcccatccccagggatttcacattagaatgtccttcctcccaatacctactcctaaccttccccaacccagaagttagtttctctccattaaaaaaatccccacagtagtataaattaagcaaggaaccattttaaactgtcagcttaatggtgcacacaggaaatatggctgctctcagtgcaagaaaattttaatgaataaagtagcttaagaaaaagatattttccaactataagtggaaaacttgttcagtttctcagaggttgtttactgccataggaattacctatttaaacttcttcacaacgttatcacttggatatggttaggttattctgcgtgtgggcgactcattaataaagctgaaggaaaagcaggacagtgctaggaaagaaatctagagctggacatttaatattcttgtgtgtcagagactacatttgtaatattaggggtgggaagtagttacttgctaaaatcccactttatactccgtttctgattctaggggtgtttttgtcatccatacaaagtcaaaaagaatgcaaaattataacccaataataatgtcattttttaaagaaaagtatagatgattcaagaccaagaaagaggcagttcataaaagatttaatgttgaaaaaccacaaacataaaaggaggctaaaattggaaaagacattataaaatctaaaactttaaaaatttgatatgataaaatatatgctggaaataatatgcaagaaagctgcatcaaagctttcttggtcaaaggaaaaagtgttaactattaagagattttttaccttaaaaaatacaaagaaacaacttagtttgcattatagactaaaataatcttttcaaaggatattgagaatagaggaccaaagagtgtttttatggaaggacaaaaggagaatgcagagtgagatttaaaagttgtgtgtgtgcatgcatataaccctcaaaagtataactccacaccaaaaacaaagaagtagctgtatctagggatgttctattccatcaaaactatgtctgtgaagctttaaagggaatcttcttgcagtctacttcctatatgaatactctctatgtataacagttcattctaagagaagagcaatagatttaaccacttgttagtatccttgttagcagtatatcaacagcaattgatcactaatgtgaaggtatcaggttttaggtaacttccaacaccattctccttgtgttcaagtgattttcctgcatcctctgaatagaaaccatcactgctaagaattgctccttagacagtacctgctggaggcttgcaaagatcttaggtaaaaagtcgtaagttgaagatattagttgataatggcataaggtcttgttcctcaagcaattgtgctaggaccgtctacattataatctcttaaagtggatatttagaaatgcaaattcttgagccctacccccagattactcaatagaatctttaaaggtacaacctaggcatgtgcagtttcagtaaactccttaggtgattctgatacagtttaaattttaagaattaaaatttaattatatctgtttgtattacatctcttcaacatacagcaaattttaataaaagctatcgaggtactaagaaatgaattgtaaatggtgaaatcacaggcaatggaaggaatatttaggtgttgcaggcaatttattatagcttgaaaatcataccatgctaactgtagctagctttaaagtaagttctgactaacagactgaacatattattgcttctgtgtgagtagaagaggttatttagaaatctttctacaaacatttgagtatctatgaaaatttacttttgcacactgagatataacaaaaaccacactttctgtcctcaggaaatttaatccaggaaaattagagctctgttttgaaagcagaggaagttaatttaaaaaacacagactggatgtatcttaacatcacctcctaagctcactaatgatacctgaaagcattcaccttcacctagttggagagatctctgctgcaaggaaaatgttaaccatcttgccagctaggcatcattcttcatactataataagcaaaaggcatttccaaagtgagactctctttgtaaatttgtttgtcattcttgtgaagaatcagatgctgtaattattaagctttttacagaacatttcaattttccaattgctctttaataattcccagcaagtaattggacattttaattatatgtagcttcttgtcactgttcatctaaaaaacatcacaacattaaactaagatgctcagcctgagtgttttcttgggttgtatgcatattttttgagttatttcaacaatgatcaaaagccagtgagttcatccttcaaactggaatcctcatttcttttccaaaagacaaaaactaataagcaacaaaaaaattaaaccatcacactaacaaaatgtattaaaagtcaatcgataatactggccatcacaccaacaacctctacctttattttattttcccataaagagccactaatccattttgtttttttctactagcttagcaagtccatatggactggaccctttcagtgtttctttcccagaatccctgcagaatcattgatctccttgatctactcatctctttgatcttttgaggatagtctacaaatagcctgtgctcccctacgtgggtggcaatagcagccctggagccttcaaaccagcttatggggttatagtcccagctctgccagttacaaacatgcgactaagtcaggccaattaaagtgaccgggctgcaacgttgccctacctgcaaaatggggcaaaaatcttccatatttaatttacaggcttgtgcagatttcatatgaaataaaaagagaagccactgtgtaaaccttgaaatctctacaaatgtgaaaatgaaaatgaaccaaacatctccccaatattagcatgacatctatcaggctcctatagaaatcagtaatgaaggaggatgtgtgcccacccagccatgccatggtacaaatggggcctctggtgtgtcagaaaagcaactggaaaatggaaaagagatggttcccatctttcctgtgtctgttctaggacactgcgagtcctcccgaaggtgtctgaaagaacacaaggcaggcatgttaagtgtgaaagacagcagaatggatttgacggcctctattaggcctgaggtcttttggcagagagtgagagaatgtcctattccaagcagaaggcacctgataagcacttgattgattggtctctgcattcttggcactcagtgaaacactgatttgccagcagagtgtgtaaacacccacattttggtaataacctaaatatctgcatattgtgaatgaggaggctgactgaatgaaattgtgtaaaaacagaaagtcaactccctgcaagtcttgccttcaccattctctttgcagatgcaggacttttaacagtgaggatattaggacatccacaagtgaaggatggagccctgccctgctctttgggagctttttgcctgtgtgtgtgtgtctggccctcattcaaggatatgctcctctctggcaactcccagccaatgtctagagagcacagcactgtgttttccaacttaactaagaattaggtctctttgctactgcctttccttaagaccaggaccaaatatatatatatatatatatgtatgtagatattgtttaacgggcctcacgtctaggcaaaatacacacacatacatacacacacgtacatacaaagtcattcattcaatagtaagctgcatttgtctggaattactaacaaaaattgaattagcaattattgcactgttgttttcttttaaaagcacaagttaaagtagtgttttctgctcatgcttaataagattgcctttctctctatttaccacatacccatctttcagagcttctctaaaagcctatgtctttcttgaagcttttactgattcccttgctggaaaatgtatctctgatttctaaatacctacactgccctagcacagattgctaagtcatgttctttggaggtcctatttcccaaatggcaggcactccatcacaagggtctccaaaattctccaaaacactagggaatgtatgaatatgtgaggtgggaccgatattcatattggctccagaggagccaggcaatgctttctccagggatacttttcactattatctgttatctagaaaatcgccttcattttaagatatttagaagaaaatccaagttatgtggtttcatagattaaacttattgctggcacttacataccactaaaagttaaccttggaggaggggcgatacagactataactttaatcatatcagcttcttgtcttaaccacatcttgctttgactgaactactctgatcctaaggactcctgactgttgatatcacagcttaaaggctttcttcagactccgggagagaaagtggtgggacactctgtaaagtgattcagttccaaagtatatatatcatcccaggtgatcatagagcttaaataaagttgcttcaaactagcatgaaattttgtctaatacacagtccccaaaagaacctctttagaaagaggatgaaaacatttaaacatggatgttaagttcctattaaaacactcatttattttaagaaattcgctagttatgttttaaaaattgataattaaattacagttgctgagcattttcctttgacttggtattttgaaatgcttgtgttctgtctaaatgctagattcttagcatttggctaaggtatacgcatcaaaatggccacagtaaaggaagtgacattagtaattctgggctaggaagcactgtttctcttaccgaaatctctcgcaactgtaatccagccaggtaaagatagctttgtgtttgctgacattttcagagttgattgggcaaaaaaggtgcaatcattttcctaagtttttcctcgtcatctttaccctctccccaccaccccctgccgttattttcaaaaggcttaatctaaattctaaaggaatgttctaagagagcgaggaaaaaaatattcaacactaaactgcagcaatagccttgacagttcagttctgctgcaggtgtcctggtttaactcccacatggacaaaggggatacaaattgttgggttactacacaatatcctcttgttaacatcgtgttgtcctcttttggaagaatcagacaccaggaaaggatctcaatttcaaccctttgtcttttacttaaagaatctaccaaatcagtctagaatgataagaatgaaatgtgttttaaaaagctcagaggagtctaccttatatctaacctcagtcctttctgttttttttttttttccagagcagaaaagacccactgttggagaggggttcatctgtcacttgaggggcagcagcaatttatcagttcctgtgccagatgtttacataatatcaagtcttcacaacagtcctacagaggccctatttcactccaggcaaaaccaaggctcagaggcttaggaactgcccaaggtcagatagttagtagacgcaatgagaattataagagtaatcctttatgtcacaagggaattccagaattcctgtaatgttattttaagtggaatgtgtgaaatgccagtaaataaacaacaacaattctggtgttaaattgaagaaacaaaagaatctttaagaacaatgtagttaagagactcaaactagaaagaatttaccatcctttctgaatgttgctccaacttatagtctaatataaaaactcataagaaatgagtagtagagatgcttaaattctctatctagtctacaataccatgcatctagaaacgacacaatttgatttttaaaatcttcaaggcttcataattaagagaccataattaaaattagaatactcaaataagtttattaattgtcagtcttttctctatatcctgccttcagaattatacgattttatttaaccatttgcaggattcctttcatctcaggagagtataatcatataatcagactcatcaccactgttcccttttaattgtaaatcatgactgcgcttgcaaattagtctattatcacagcagattatcaatttggtagggaaagtatttgccatctagaatgaaagtagttaataaacattaataaacatcttaaatcaatcactcctttactcttggtgtgccgacagatgtcatttgagattaataaatcagtcagaacaaataaagtgatgaggaagcgaagcacaaggaagcctctcgatgccctgtgtacttaagaatcacaatgcctaaaaactaattggaagataaagataaggcattaaaccttcagagaaatgacttgttggaaattagacaaagtaaatccagatagccattctctgtgggtctgttatgaaccactggcaataaaagctagaggagaaacaaaatgctcagtcagaataaattatgtttattgacagcataatgtagaggttaaaagcatggactttcttttttctttttctttttttttttttttttgagacggagtttagctcttgttgcccaggctggagtgtgcaatggcttgatctcggctcactgcaacctctgcctcccaggttcaagcgattcttctgcctgaccctcctgagtagctgggattacaggcaaaggccaccatgcccagctaattttgtatttttagtacggatggggtttctctatgttggtcaggctggtctcgaactcccgacctcaaatgatctgctcgcctcagcctcccaaagtgctgggactacaggcgtgagccaccgcacctggccaaaagcatggactttctaattggcctgcttgggtttgaatccagggcccacaacttccgtttcagtgacttaactatttcttaattttgctgtgcctcaatatccttatgggtaaaatgggagagtaaagtacctatctcataaagttgttgtaaggattaaatgaatcaatattttgttaagagtttaaaacagcacctggcatataacaagcactgagtgattgttcaataactaaatgatataattggccatttactaccattttatgtgctctagttctttctctgcacaggcttttatgagggagaattggggttgtgaagtaatcccacaatattttaatcacttcctcactataagccaagagttgaattaattcattttgtaaaaataattaaaatttaattaattctattaaaaagaaaaaaacacaaatttttcatttaaaaataagattactgaggcaaaatgttaacagtacaaatagactgttgttgtatagtccagtcattaattaaaggcatccagatatcaataccttgtgtattaacacaagacttttgtataaagatgtttaccagaagcccatcaggagtgttccacttttagttatggcacaaaacgttatccactagcatcatcaacaactcctctatatctcacctaggactagtcccaagaaaaagaatgagtagggaaaccaaatacattatttgcatatttaacagcatgtccaattagccactttgctgacagagactaatttattattcatcttattccagcatatgttactactttgacatccacgtgacaaatgactgatacagcacattgtgattttgaaaatgttaactgtggacttcaagaaaatgtagcttagactattgaggaaagtttctctgcttcaccttcagaaatatggaatctagaaaatgatcaatttttctactatgtaggcacaaatggtccaatatgacataattttcagaaatgagtatgaaataaaaggaaataagctatcaaatggtgccctgaaaaccaaatagaaggttcaatctctacgtacatcctctaggcaaaaattctcagaggtatttaaattagacatgttccagtattatttctctatactagattgtaatatattttataattgaaaaggataactatacataaaatgatatagatgcatagataggaactaaatcattcattcaattaacaaagacagaatcttgaaaaatttgaaagccaagttcctcagaaaaaccacatacttctttcaaatgtgcttggatagttttatattagaaagagaaaaaaaaaaaaaagataaaacaatgtgttgctgcatgccccttcaaaatgtgctcatcggttactgtgagagtactgtgtcacggggctaccacacttttcctgaatgtattttttagaacagcatcacagtcaactcctagtgaagtactttatgctctgtaactatccacactttagatttttcagtcttaacataaaattaaaaatttcagaatctaaaattatctgttttaagtagcattaaaaataccacttctctttaagcagctctgaaacctgaagtcatctagaaaaatatgccatgatgaccaaatggtaactaattgccaagacagactaaaccacataaataattacatgtaccatcgttagtccaatggcaacccagataatcaaaaaaaccatgattatcatggcatcatggcagaagtgttgtccaaataagtaaatttcactgccttgtattttaccacatattaaaaagcactcttttacaatctgttaattttttttctttctttatagttgctgattttcagagatatatcataatgcttttaccaattttaattatttgacaaacaagtcaccaaatatatacaggaacatttaaaagttcacaaccttggtttaaaaaatgtaggtcacattatgcaatacatttaaactggggatctcagagcccaaagggttctatattctgaatttcacaacaaaaatgactacaagattcaaagaaagttcatagaaaacaacatatacataaccacataccttgaaaatacactggagaaacacctttctatactgcctcagttaaaattcacaaatctcaccgatattaagttcccacaattaatgcagcaggttcttcttatctacttgtatatttagtgattaaaaggaagtctgtacaggaatcatcatcttctagtgttaaagctttttagtatagtggttactatttaataaataacattccttatcactacctgagcataacccttcaagtcaaatttgagaacagtcctcatttattaatccatctccatcttcctacttactgactaagtaccacaaggtaatattagataaaattccttccactgaaatgcagacataaatttcacatctatattgacttgaaattcttaataactatgagttagctactcttttgtggctaattttattgttaatgaagaacattttttgagacatgaattggaaagtaccaatgctgggacaaatttcaggtcttctaatttaaatccagtgggttttgtttgttagtcttttccaaaaccctgccttttatattgtcatggaaaagcaaatgtacagtggctatatattaattaggtgaacctgacataatcatcacctctttaaatttgtttccttgtcagcaaaatgatgatcataagccctgccgtggttgtgatgatgattaaatgagacactttatatgaaggcactgtggaaatatatacttaaaagatagctgttttcactcagttctgtcaaaagcttgagggaatgcattgttatgtgatcaacactgaacaatcttgtattttgtgagagaatggaatattttaaaaggccattacaagcttctatgtggagagatattctacaccctacatagaccagaaagggctgggcaaaaagaccaaatgaaagaagcgggtgcttttctaagaggaaatccttgagacctcagttgcgagacaagtactaggccaaatgcaccttgagcctgaccaccacgccatggctcctgtgcacctaagtaagccactcccagaataatcatgaggacaattagatggcttaagggacctgaatataatctttgcaaaaatatctccagttacaatatgtttagaatcaatacgtccctgggaaaagacaacaagaccatgaggattttaagaaatccttatgatcaaaggaaacttagaattggaaatgatcttagaggtctgctagtccaatttaaaaaaaagagagagagaaacagagaaaaacgaaacaagaatatgaatgacaaaacagtataaaaagtcatgctcattattattgagattgttaacatctcaaaacataaattgtgtttttttctttaaaagaggcacacactgtagcataaatgagtcatcgagggctgactgtggtgatggtcaacagtaaaggaaagctggttttctctgtatgaaccaagtttggttgctctattctcttctcaaagaccaagcctctaatcccagttaattgtctaaaaaggactgcttttggtcatacagtatacaggtgagagtgtagatgaattagtgcaggctttcccttctattggagtacaggctttatggaagagtattccataggaggaggaagatgagttagaagatatgggtcctgcctccatctctgctgctgatttgctgtgaccctatgagtgtagttcacttaaattatttagatctctgttgtcacatctgtaaaatgaaaggaatatactcctcaaactttagaactgaaagaaatgatgttcaaagtggtaactgaattccataagtcactgagttaataactggctgaactgggacaggaactcaggtcttctgattttaaggtctagatttcccctacatgtgctctaaagtctcttttaagtatttcttaaaaaaaaaaaaaaatcattgggaacctactatagtctgggcacttttcaaattcatggtctcatttattcttcacttattgtattttcattttataaatggagaaaacattcttagtaaagataagcagcttcgtacatttacacagtgctagtaaatggcaatggccaaatttttacacagatatgtttctgagaagtatttagtcagaccagtctgcattaattattcattattagtgtaaatttaaatcactgaattcctatcttaactacatttacaaaacaagacttatatctgttcgaaaagtagaaattgttatgttttgttagaaaaaatatatgcagcaacttggtggaaaacaactgtataaagagctctttctagaacattaataatgaagggcaatagaaagtggtgtagataaaatttactattttgatgtttttatcagatcatttcatggtgagtcccagatgattgctacatatacataaactttatgttttttgcatttatgcttggaaactatgtatttttaaggaaaaaattgaatttgcctctttaaggattaactctttccaacaatagcttggatttttagaactaagttgtaaacttcttgatggttctgcctccgatatcttgcctcctccaacctcaactctactctcatccttattattctctggtcctccatggtacctggtacacaaatacaaacacatgctcatagtaggaatttatgatatatttagtgaataaatgaatgcatgaatgaacaatctaagaaataaatctattaaagttttgggcaaccaaaaaattattctaaagtgccagggttacttggatcatcattgattcaaagattcttccaaaaatagtagctggccatcttgttgaaaacagcatttaagtgatataacattttgtccaagaatccaaagtaaggaaaaggtgtggaacaccagtgtctgtttcagcagaacagtcatagccaaaaacattctgggtcacacatatgaattcattaccagctaattaatattaaacattaaagctaaatatttccccaatgtagagaatattgtcaaaggttttgctagctctcttggttgccacacaaaagagtaaagggattactctatgaaacattaacctcctgcctcctggaaaaacagagaaacaaaaacctcctcagcagaatcaatgaagtaatctgcaggactccagtgaggtaccaacagctttctaacagtgtgcattattgttaaaacatgcttgaagcaaaacgctggaccatgtatcttgtaattatttcttaagagatcaaccattaaacggcatagaggaccctcttagtttaagtttaagtttaaaaacctctgagctcatagaattgctctgggctatgggccataggccttgattctaattcctctttgactctgatcagacatctggctccgtcttttggcccatttatggtatgcctcagtatccctacaggaaaatcacattcaaactcactctgaaacctacctatcctcttagaagtttggtatgtgtactgaaagtgtctcagaaacagaaacattataaattcaagatataattattatccttatataacaccattaagcaacttcaattacaaaccacacttttaaaatctgttaacacttccttctgggaaagcccttttgccctttaatagtgtaagctaatcatggcaatataatttccagagctcatatttgtgggaggagaaaggatggcactggtggctttctccttcctttatctcctgaaattattgagagactctaagctaattttctaaagtatgcagaggcacttaggaaagccgggagctgagatgggaacctaagcatttcactgacatcattccatgctccccacatatggcacatcacataagcagtactggctgagcacactggtctattctggactcttgttggcgttaagtagcattcttaattacaagcaggcttgctttttgtcatttacagtcacacagttctccctctatttaactagaaaaaaaaaacacaatttttctatggaggtagtttcaccatttatgtttttgagccaatgcaaaatataaaaggaccctgcagtgttctcaaaacctgcttctcacaggcccttaaaaaaaatcctcatcataatctctgcaactgggtcagcttgcacaaagatactcgggtagccatgagcgctctctgcgccctgcaaaccttgtaagtgacacctcataatagtgcaaatgaagcatggcaagatgagaaaatgaagaagaatgaacctggatagtcagcccagcagctttcaaaacataggggactcaattttattccttaaactataccataaatgaatttttattttacacattcaagcatatacatgcattctctattatgaaagaaaatgtcttacgattcacagaaattctaatacaaccaaacagcctagttcatttgttcatctagccaaataaatttgcaatagtctcagattttgaactaaacctcattttcacttgtcttgactttcagctatgaatttatcatattgtcattaacgtttgtgctttcctttcaccctcatctattaggctcaagggttctttacttgtgggtcctttgtcccaacaactagcgaaatattcagagagctattgacccaacaaattcaacatcacctctttcttattaggtttctctttaagccatcaccctgcctgccgtgttctcagtccctctgcactcacacctcaccccatttctccatcccccaccctgagaggcttattttttatcctaatgttccttgattgttctctataaagttaatattattttcaaaagagagaaaggatgaagtatgagaaattcacacctggcttttatttggcaggggttggttactgacatgtaagtttgcgcctctgattgaaaaaaacaaagaatcagaagaggagcagcctcttccaaaagagtaagcatgaaggagagtgggcagaaatccaaaaatacacaaacacgaccatacaacagaaccttcgaaggaaacagaaagttctttgacccaaaagaataataccaaccactatacacacaacaattttctctactatcctattctttctctttttcgatgacagacacctctgatttttcattcacatgcagagacaatcactgtattctggagggaaagaaatgtttgtaaaggccagcagacggcgcctgactggggcagaagcttgcagcggagaggaaaaaggagtgccccactctgcggcagggccccttggtcttctcctctcccacgtccccagcagccttatccctctggagagaggccgagacacagaaaaggagaagttgcatatgagattattagccaagtgcttcccactggcacaattaggtgttccacctgctccatacacccatctgcctcaccacacccacctacccacactctgcccttcctgcaccctggcttgcctccgtccctcaggactcacacaattctgcacaaaggcagggcagtggttgagaactgcacccaggtaaagggaacaacaagctcctagaatactgtgggcttgtggtgagatcaccagaaactccttattctttcagagagatctaatctctgttacttataaaaataatccctagcttgggacatcactctcgtctccatactagacactcttaactggagagaatttctgggagagaactaggagaaggagaaaggaacaaattcctagaacccacagggatgtgttttttctagtatgctcccaaagagggcttgctaggggacttggtctctcttcagttagattatgctatagtttttcatatctaaccagaattgtccccaggtgggaaacccccaccccaccctgcatccatggaataaagggccatcctggtagcaccagcagctgctcagggcagagcaaactcataaggagtggggcaaaggattctgagctgaaacaagtctgaaaggtgacgggtcctgcaagaaagaggtggaaaatggatataaaaaaagtgcccacaactttcactctgctttctaaacaagtgcattttacaccggggtagaataaaaattgggagtggggaacgactcacaaaaacagattgatgttttaatttttggcaattcggggaatctggaatagatatttatctgaaaattagaggaatctggcctcacagtgctggtcactctggaggagaaagctgccaaccaaggcttttctctacactctgctgttttcaaagggacagggcattaggagaatagtttcccttagctctaacttcttctccaggcagacctccgggcttagcccagccagcattgactgacttgcccttcctggaaagcattaatcactgaaggaggaagtaagacctccctggttccaatagccttcacacgtgatcctccgggagatgggtatgtgtagtcaagcctctctctgttccatttagaaaagaactcagcctaattaccaagaaaaagacatatatttatgtgcagagtggatggaaggggaatggtgtccagaggtcccctccatgcctgcgaagggctggcccgcattaaaggggatgactcggttgccctcctagcttttctaattaagggaaggcgtgggggcaaaagtaattggcctcctgttgagtgagtcccaggactgcttcgctgtcactgcagtctgggcgcactttggaggaatgtgcgggctggaatctctccctccccgccccccggggccagggaagatgggcaggaggtggggcagcatatacagcacagacaaaaggttctgcagagccctcttctctctggtgctcaggtcccttagctgagcgcggcgccccatccggccactgagtgaccttctggcaactgacgcccccttcccgcggggcccagccgcgcgaccagggctggtcctttagtaggtgtccacatctctctcccagtacctcgacaaggaacgcccctcccacccctcaccaccaacacccgcgacgccttcccccatcccctttctattgtcttcaaagagataagtggctcgcaccaagcacacccaaatgcacctcccttttgtcgagctcccatttctctgagccttaggagcccaggagcgagtgcagggtagaaagaggggagcgaggggataacccgcgagaacttggcatcgcagacccaccgtgtccgcctcgcaaggatgccggtgacctgtagattgcaataggcactgaatgatgcttgctgctgccatggaaatggtggatgtggtgcgctcccaaactggatgccccccacgccactcctaggaggccgctgagggtgagcgggactatccaaagcagggccaggcgcccccctgcgccgccgccgccgccgccgccgccgccgcccccgggcgagcccagctcggcgccgcaccggagcatcctctggtacatggcggggcgcccgccgaggggcagccgccgcgggaggcaaagtttggggcgcggggagaggagagggcgcaggggagcgggcggcgcggagtgggctgaggggccggccgcctcaccgcgccagggcacccatcctctccctccttcggacagtcttctcggggtcctggagtccgccgtgcctagcaccccaaacaatccgaaacatagccgaggcgaatgcagctggagaggggcttgtccggaaaggcagccccgggaacagcaagcgcggagcgggtggctgctcccagatttccagggctccaggttctcgagagatactcccaaagagtttcgggcgagagtgcgtgccggcgggtggggggccgagaaattgtttaaagctcctcctggaaggtcctcacttctacatgacagacatccaccgcgaatccactaggtaaatccatttagctttgtgtgcggggactagggaggccacttcgccggcccaacctcctttcaagacagaagcagaccccatggaatccaggcgccccttccctccattcagccccggccggctcgcccgctagcgccagcctcccccgggcagcgcgcggagcagcggcgcgcatcgcctgctcccgaggcaatctccgcgtccgccgcctcctgacacttacgcccggcgaggggttcagagggaagagtgcgcccttctgaaggaagtgggaatcgaacggcggaaaggcagctgagaagaagatgcagacgaaggagtaagggagagaaacagaaaaagaaaaagaaaaagaaaaaaagaaaagaaaaaccacacacgctggtgaagcaaggggctctatgcaaatctgcagtctccaaacagcaaatcactgaagctcggatgcaatgcagaggacgagcctatgtaacgagggaggctggtctagcttcccacgaaaatcgccctgctttgcctctcccttgcattctccacgcatcaaagggacacgtgtaaggcgaaacgggaacacctaaaaagcaactctccctccaccaggtgatccctccatctgaactacaatggcaaatggcacccttcccctacccaatggtttagatgtaaccagtgtctttagagatcttaaaagggagagaattcgggtctttttattggaccaaacttgttctaccaggtgtttaaactcaatctgctaaatatggcttgataccttgtactcaagcatcagtcgcgatgatctgttaatcacatatgttactcataacaaggattcttcttcccattaccatattatatctcatataaggcagtggaagttcaggggaccaaaactcacaaggagggaaaaggatgcattaatttggcagctgcagaagaggcagaaagtggaagaatgggaagagaggaagagaagggtcaggagagaaacaggaagaaagcagaaaagaaagaaatggcatgaataaaattgcttgtatttcagtcaatattttaggaatatttaagatcttccaagatctctatagaagccccgctgtgatgatctttgctaacagtggaactcctcctttctctcatcctgtcttataaagaaaatagcatcaggaaatgaaaattcctaaatctagtgcccccaagggaaataggacatttatatgcttttgatgaaatacagcatctttaactgaaagctgtgtgtcctagatgaaagaccagcaaagccagcataaatttaagagtagaaatctagcaatgcaagtgaacttggctaggaggaccacaggcactggatgctggtgattaagacttgggactatgatttaaacatttccctgatttccaaaagatgataaaaaactatgacatgtccagtggctggacttttttttttttgtctttatttctatttaaagccaaaagaaagcaacattgaacaggaatgatttctcactagcttctcaccatctacataattgttatcaacaaatataaagtccagtattttttaaaaaatgtaattctgggaagatttgattcaaatcagctactaacccaagtggccatttagacttgtatattgcttcctagtccaaagattcaaccatgggactctgatgcccactatataaatagtgtccagtggcccccaaatcacacctgtagcaatcacacatgtcacattcctgtcaaaagtttattttatgatactaaaagataattcttcagtagtatattgattgaaacagttcagccttgctaaacatgatgcttttatctatttaaatatgccgtgtctcccaaccttccacagctgctcgaaggccagcagacgcaaaatctatcattttccactgtgaactgtttctgcccttgcccccagtcatttcttactcattttgttattttgcaacatatgtattttaattcactaacaagagtcgtgattattcgttttaaaaatatcaagtagagcttcaaaaagaaaaggaaaatcatccacacagtatgttttcaggactgcaggtccatattctgaatttgacatttcatagtgttagcatggaaagagcactggattaggagttaggaaatccgtactgcatttttgatgccaccatttactggttacatcacattagttactgagtctttccctgaggcactgtggcttcctttataaaatactcatgtttctatctttcctaacaatcccacagggtagaaaggatatcatgcaatatttaatgttggtgttctttaaaatatgtcaactgctccctgacatgaaggcgttatgtctcttctctcatacaggtctaacatattcaagctgatcaccatgcacaatacattcagttgccttccatctaaaagatacgtagaacattgcattgttttccaataccctcatatattgtgttaatctatcctttcctccccaaataaatggtagatgcctgaaggggacaagagtcaagtcttcattcctacttcctctagtgtccagcatatgtgaaacatatctagtctcttagtacttacagtcagttctcattattcacagtagctgtggcaaataaagtccctgtgaacactgaattagcaaatactgaaccattgctcccatggggaaatacagggctatgttcctgcaaacctctgatcacattttcatcactgaatcaatccattgccttgttttatgtgtttctgaatgataatgacaccttccttaatacataatgttgattcatcaacattgaactcatgaccagcagcactctaactcatgcctaaaagaaacatatctaatatgtattttctccataaggcacatcacatctttcttgcatttaggaacattagacagccctttagtattatgcttgagggccattttaaacagcaaagtcaccaacgtaaaacacaaaaacgtggtgctaaaaagacctaaaatagcgcacttgtttacagtgtgagagctgaaacaagaaggaagccaatagtcttgttcaacttcagccaggaacatgtgcattgggaacacaaacgtttgccattctctgcgtgtttgctaaggatcatcaaagtgccagggctacaaataaataacaaggatcaactgtatttgttattctcttgattgctaggaatggataaggctgggactttggagagcgatttgtataaggaaaagccatagaaatagaataagcgtagaagattgtgaataaccttcccaagagcattcaattaggaagatgcttcccctcctccctcactcccctgcctgtcttatattgtctggggccttgggagataaaggcagggttagagaaaggatgggccagaaatcttagttttacaggagtctcaagagctaaagagaaaatatttatggctgcctcaaaagaagaaattgtagctgtagtcttccaggcagatgtctagggcacctttgcaatacttaggaggttctagggtgtatgctgtgatacggatacagcaatatttgttataaatgattgtaattttgtggaacaaggagcaattctctgtctagatagtgtagaaaaagtattgtgggcaaaaacatgagtaatctggatgaagcaaataaagcttgtgtgtacccattaatttgtgtctcttcagctactcagtctttgggcttgcaattttgttatctaagggaaactgaggcagaatctcacaaattgttctcaggtgattgaagaactggttggaggaaacatggtttttggctaactgtaatgtattctaaaaaaattcagcacagacagtgcgatgtaagtgtttcttaacgctgtctgtaccccaagagtgtcagtgcctttatcaggaatttatgccccaacacctcagtcagaattacagcagacagaggtggcttctagaagccttgtgctactatcatctctaattatgatgtggctgtgctcattagttataatatctgttgaaaataagttatcactgatgaaattaagggcttgttaattggtccaacgaaagttaggaggaagttaatcctttgtgaaattattaataggcaagatgcgtgaattaactaaattttacctgaacacgcctcacttctacataaacagagtatgtgactctaagaggcttttcaccctttattatgaggaatggttccataataatagtaataataaaaactaacacttatttctagcacactactctgagtgatttaaatgaattaattcatataatcattacaaaatgatatgaggtaggtactattgttgatccctaacagttcttagtcacttaattctgagagatggtgaggtgggtgctgtcgttgaaatactgtcatatttgcttcaggaaaaccatttttggaagacatttttttcaggtacttaaaagaatgaagagctggaacttcaccaagcttctagaataggctacaaaattttgtgcctactcattaataaatgtctagatctgtagcagaagttggtcttggtgttgaattcattatgagctgtacttgtgtgaactcttggaaacggggttcacactcagttgccgccaacaaccatggctactgagatctacctaaaagaacctaaggactgtatgtgctaagctgtcctaagcccactcacgcctgatgatttatcatgaacaagaatacagggagcctacgttgaacaacagttaagaaatgagacatggatttgaaagttgagaggaaaacacaaaagaaatagaaagagatggaagaggagagtgagtggaagagggagattctggagaaatgggaaaggacaggccatttcaagttatttcttcatattacaaaaatcaacctttttgtctcaaaaaacaggatggttgtcaggcagacactttcattcttttcatattttccttaagcttaattggaaacccttaaagctcagtattaagctttttaaatagaaaagtagacactaaaatcagcagaggggaaatatattaaaacccacaggcagcactaatattttaaaaattaaaaatgagaagagtgtcggtcttgcattttgcatttctaccagtatccccataaagtaaagataagcagaccccacatatccatctacctacttttctgagtttgaactgagcgtcagtaaaaagggacagactcagaagagggtttgttctggagagctgtaaagctaaacccctgatcctgttacccctctggattattgcaggtccctaagagtaagatcagaaaatgagagtaagagcattgataataataataataataataatattataataataataataataataataataatgccaggctaaaagcatctctggagatttactgcaatctttttattattcagatgataaacttgtgttacagaaaagtcaggtttatttatgaagtgtttatttatcttgaggaacactttcacctccaaccaccgatagtccagtcatagatatagattggtgaattcagtcaacttagctattacctagcacctccccaatgatataacaaatcagagggagtgctggggatcaagatgagccaatgcggtactcaagtcactcaaattgaattaaagcctagatgtgcagtttgacttggaaacgtgactagatttattcaagtcaagattggttgtgtttagctctgaaatattctgtaatctctatcttgtctttcattcgatttaataaaaatttcatgtttggtggcttgcatacaacttggtgcttaagtaccaagtcagggtcatagagatttcactataactgcaagttcaagtgttgcaggcatcacaggagcaccaaccaataatatgccatcttttaatcactgtcagcttatatagtttgtagaattgtttcaaccgatttctgttggtgacaaacacttcctaggctcatgctctttcagtttcaatgtgttcataatgtagcgtgacaacatgagactggagtgcctgactgtgagtatgaatccaagcttcattgtttttattcatgtgacattgagtttaagggccccttgtcccagtttcctcatctggaaaatgattataacgctaaatgtaatgaaattggaaccatttctaaaatctattaaacacacaataaatatgttattattctttattcatgtgtacttagtttagcttatttattctttattcataggtactttatgccaaagacataaagataatgagctgcgatgtggtttttaatttggccatattctaaagtcttcccactcagtctatagtcaagctcagccacttcttaatttattaccatagcctctgtttctctaaatctgtgttgctcaaactttagtgtgcatagaacatacactagaggggctagaagggctgttaaatcacagattgctttgcttttgatttccttaatctttggaggaccctgataatttgcatttctaacaagctcccaggtgatgctgaagctgctagtccaggggaatgccaaggtccttatttcaggttttattaactaacacatggagagctttctcattaagctccttaccaatgatctcacctcccgttagttgatccaatataactacaggcagatcagtgttccctaagcatagatcatagtgctgttcccagttctcttctttaaagcattctttaaaaacttcaagatgtctattatataaacctatttgttctcatctcacaccatgtaactataaattctctttactacagttagaaaaaaatattctattttccttctcatcttttgtatttgagctcttttatttgttgccttaccagtggctatgagcaggaactcagacactacactagggttcaattcttgcttctacaaacttgctagctatgtggccttgggcaggttatttaagctcagttttcccatctgtaaaaaaggttaattgtagggttgttgtgaggattaaatgagtcgacaaatttaaagcatttaaaatacaatagtgcctagagtatatgtgtgtgtatctatatatacactaccttagcgtctagagtgcatacatatatatatatatatatatatatatatatatacacacacacactagctttttgctgttgttttctgaaatgggttttttttccccttgttttatggtagggagaaaataaatcagaatttatgataatattgttacatataattcctaatactggtcatccaaatagtcaccataacaaaactaaactaaacaagaacaaaaattaaaaagtcccttccaggtctgggcatattaggcctccagtccaaccagcatcagctagagaaaagatcaatgccatgaactggcaacctgggatctgtgtgcctgaattccaagacactgtctgtcatacacatctaccactgcagaaagaagcatgagattgttgagaacaactagaagtggaaggacaactctaaggcaatttagggtaatattaagactaaagcataatttccaaattctttggtaaacacagatactcaaaccaggaaccagaaatcatgtaccatatgtttaatttcctgaatgtccaaggactcagagcataaaacaatttgatttatctttgtgaatatatgttgtagagcatatactacaatttgaatgcactgagaggaacttaatcatgcgattcaaattgagtctctatctgggatctataatctaatccccacccaattcagaaattcaggatatataaattatatatatatacatatatatacacatatatacaatatttatatatacatatatatatatttgttaggttacacattttgtcagagatattctgatgtcaatactatagataagttggtatgactattctactatcaagacctttttaccaggtaaaattaaaattctgtagcatgttatattaagccctttaaaatgtgcctccatgcctcttgttttacctccatttcaacttctgccactttccccacaaacaccccaggctccagccacatgaatttctcactcttccataaaacacactgcacactttttgttgttgttgtttttactttgacatatcccatgctattctctctgtaaaactatcttttctacttccttcgtctcttagtattgcattaattgttctatcaaatgttaatatatatttccccattggaaaaatttctgaactctgtcatttttttgctaccttctcaagtgtagaatattacaaatacctaaaaaaagagtgaggatatgtaacagtgtattcacattactattgtgcagaataaatgatgatcaaagcaactggttaagtctatcaccatgtttagtggttaaaatcaccaaagccaacagagaaatgaaacaaatcctcttcaacttacccttataggtttattggtgagttatttttattatctaaaatatataagaagtttaggcttaattttaatttgaatgctaagtaagctggttataaagaatgatggaattcattgtcatattttcctactcatgttataaacagatgtctttcttttccatacttcaaaaaaaaaaagaaagtactgccaagctaagatgcttgctgccaagttgaattacagaacaaacatttatagccaacttataaattcttaactgtagggttttataatggaaatactgtcaccattttcactataaccattcaaataatattactatagcaaaacttatcatctaatatttttttctgggatggatgagggaagactagctataagagttggaaaaacttctagtagctcaattcaaattgcacaattattccaatagttcaagtctcttagaatattgattttaaagtaagaagtatatgctccaaaacatttattcttaaaagataggaaattttttgatacctgtataagaaatatatgacctctgaggcattttgaaaaattattaatcaatgttgcttttctaaaactgtcttattttccttttgtaaaagaattactttccctcacattttctctgttctattgctgagatgattcccccggagaactgtgtgtttatcttgacaggtgttagtagatccaaagacctctgtggaattgttcctggttgcgttcaagtacagtagaaaacattatgcctgcaaagcaatgaacttaccttattgccttctaaataaaataaaccacacagcaagtggaattaatctactaatgtcttcctaatgaagctttcattagacatatggtgtggtcttcaatatttaacacgacaggtattaaaacaaagcatatctgatgatttttttaaagcatacttgatgactgcctcttacgttatttttaaatgaactagtttaccttcagattgctttaggcacctaatcaaagagatacaagaaaatatctagacttaagatttttttttaatcaaatagaagaaacaaatgcctcactaccaatgcccttaaatgatgaaaactgggccaggtgctcaggcctgaaatcttagcactttggaaggcgaagacagaaggatcactggagactaccagtttgagaccagcttgagcaacataaggagaccccatctctacaaaaaatttaaaaaaattttgtagaggcatggtggtatatatctgtggtgctagctaacataggaggatcactttaacccagttcaaggcagcagtgagtaatgataaggccactgtgctccagcctgggtgacagagagatcccatctctacataaacaaataaataatacatttatttatttatttatttttttttttatttattattttgagacaaagtttcactcttgttgcccaggatggagtgcaatggggcaatctcagctcaccacaacctctgcctcctgggttcagacgattctcctgcctcagcctcctgagtagctgggattacaagcatgtgccaccatgcccggctaattttgtatttttagtagagatggggtttctccatgttagtcaggctgatctcgaactcccaacctcaggtgatccactcacctcggcctcccaaagtgctgggattacaggcatgagctaccgcgcccaggcatatttttatttatttatgtgctattctcatattgaagggagaggcaaatttccgattttctgtgcagtgtaaaatttcatgcattaataaaatttataaggcaaatattaagaatgaaattgttttagcccaattcacagtggtttgcttcagaagtagcaaacactggattcccaggcaagatggccaaataggaacagctctggtctgcagctcctagcaagaccaattcagaaggcaggtgatttctgcattttcaactaaggtacctggttcatctcactgggactggttagacagtgggtgcagcccacggagagcgagccaaagcagggtggggcgtcacatgacccaggaagcacaaggagatggggaactccctctcctagccaagggaagccggtgagggactgtgccatgagggatggtgctatccagcccacgcactaggcttttcccatggtcttcaccaccgacagaccaggagattccctctggtgcctacaccacaagggacctgggtttcaagcacaaaactaggtggctgcttgggcagacaccaagctagctgcaggagtttttctttctaccccagtagtgcctcgaacgtcagcgagacagaaccattcactcccctggaaagggggatgaagccaggaagccaagtggtcttgctcagcgaatcccacccccctggagtccagcaagctaagatccactggcttgaaattcttgctgccagcacagcagcctgaagtcgacctgggatgctcaagcttggtgtggggagggacgtccaccattactgaggcttgagtaggtggttttcccctcacaatgtaaacaaagctcgtgggaagtttggactgggcagagcccaccacagcaccacaaagccgctatagccagactgcctctctagattcctgccctctgggcaggacatctctgaaaaaaagacagcagccccagtcaggaacttatagataaaactcccatctccctgggatagaacacatgggggaaggagcggctgttggcacagcttcagccaacttacccactcctgcctgctggctctgaaaagagcagcagatcttgcagcacatcgctggagctctgctaagggacagactgccttctcaagtgggtccctgatccccatgtctcctgatggggagacacctcccagcatgggttaacagacaactcatacaggagagctccagctggcatctggcaggtgtcccactgggacgaagcttccagaggtggaagcaagcagcaacctttactgttccacagcctccactggtgatacccaggcaaacagggtctggagcggaccccccagcaaactccagcagaactgcagaagactgttagaaggaaaagtaacagaaaggaaaacaaacagcaggaaaactaacaaacagaaagcaatagcatcaacatcaacagaaagaacgaccacgcaaaaactccatctgaagtttaccaacagcaaagaccaaaggtagacaaatccacaaagatgaagaaaaaccagtgcaaagaggctgagaatttcaaaaaccagaattcctcttctccttcaaaggaccacagccccctgcaagcaagggaacaaaactggacggcgaatgagtttgacgaattgacagaagtaggcttcagaaggtgggtaataacagactcctctgagctaaaggagcatgttctaacccaatgcaaggaagctaagaaccttgaaaaaaaggtagacaaattgctaattagaataaccagtttagagaagaacataaatgacctgatggagctgaaacacagagcacgagaacttcgtgaagcacacacaagtatcaatagccgaactatcaagcagaagaagggatatcagagattgacaatcaacttaacaaaataaagcatggagacaagattagagaaaaaagaatgaaaaggaacgaacaaagcctccaagatatatgggattatatgaaaagaccaaacctacatttgattggtctacctgaaagtgaaggggataatggaaccaagttggaaaacacacttcaggatattatccaggagaacttgcccaacccgcaagacaggcccacattcagattcaggaaatacagagaacaccacaaagatactcctcaagaagagcaaccccaaaacacataatcatcagattcaccaaggttgaaatgaaggaaaaaatgtcaagggcacgcagagagaaaggttgggctacccacaaatggaagcccatcacactaacagcagctctctctgcagaaaccctccaagccagaagagagtggggatcaatattcaacattcttaaagaaaagaattttcaacccagaatttcatattcagccaaaataagcttcataagtgaaggagaaataaaatcctttacagacaagcaaatgctgagggattttgtcaccaccaggcctgccttacaagagctcctgaaggaagcactaaatatggaaaggaaaaaccagttaccagtcactgtaatgtgaaagaccaatgtgtgtaaagaccattggcactatgaagaaactgcatcaactaatgggcaaagtaaccaactagcatcataatgacaggatcatttcaaacataacaatattaaccttaaatgtaaatgggccaaatgcccaaatcgaaaggcaagactggcaaattggatagagtcaagaccaatcggtgtgctgtattcaggagacccatctcatatacacagacacatataggctcaaaataaaatgatggaggaagatttaccaagcaaatggaaagcaagaaagcaagggttgcaatcttagtctctgataaaacagactttacaccaacaccaacaaacatcagaaaagagaaagaggggcattacgtaatggtaaaggaatcaatgcaacaagaacagctaactatcctaaatatatatgcacccaatacaagagcacccagatttataaagcaagttcttagagacctacaaagagacttagactcccacacaataataatgggagactttaacaccacactgtcaatattatacagatcaatgagacagaaaattaacaaggatattcaggacttgaactcagctctggaacaagcagacctaatcgacatctccagaactctccaccccaaatcaacagaatatacattcttctcagcaccacattgcccttattctaaaatttaccacataattggaagtaaaacactcctcggcaaatgcaaaagaacagaaatcataacaaacagtctctcagaccaccgtacaatcaaattagaactcagcattaagaaactcactcaaaaccgcacaactacacggaaactgaacaacctgctcctgaatgactactgagtaaataacgaaacgaaggcagaaataaagatgttctttgaaaccagtgagaacaaagacacagcgtaccagcatctctaggacacagctaaagcagtgtttacagggaaatttatagcacataatgcccacaggagaaagcaggaaagatctaaaatcaacaccctaacatcacaattaaaagaactaaagaagcaaggtcaaacaaattcaaaagctagcagaagacaagaaataactaagatcagagcagaactgaaggagatagagacacaaaaaaaccttcaaaaaatcaatgaaaacaggaggtgttttttgaaaagatcaacaaaatagatagaccactagccagactatatataagaaaagagagaagaatcaaatagacacaataaaaaaatgataaaggggatatcaccactgatcccacagatatacaaactaccatcaaagaacactataaacacctctatgcaaataaactagaaaatctagaagaaatggatacattcctggatatatacaccctccgaagactaaatcaggaagaagtcgaatccttgaagagaccaataacaagttctgaaattgaggcagtaatttaaaaaaagcccaggaccagatggattcacagcctaattctaccagaggtacaaagaggagctggtaccattccttctgaaactaatcctaacaatagaaaaagaggcactcctccctaactcattttatgaggccagcatcatcctcatatcaaaacctggcagagacacaacagaaaaagaaaatttcaggccaatatccctgatgaacatcgatgcgaaaatcctcaataaaatactggcaaactgaatccagcagcacatcaaaaagcttatccaccacgatcaagtcagcttcatccctgggatgccaggctgattcagcatacacaaatcaataaatttaatccatcacataaacagaaccaaagacaaaaaacacatgattatctcaatagatgcagaaaaggccttcaataaaattcaacagcccttcatgctaaaagcaatcaataaactaggtattggtggaacatatttcaagataataagagctatttatgacaaacccacaacaaatatcatactgaaggggcaaaagctggaagcattccctttgaaaaccggcacaagacaaggatgccctctatcaccactcctattcaacatattattggaagttctggccagaaaaatcaggcaagagaaagaaataaagggtattcaaataggaaataggaagtcaaattggctgtttgcagatgacatgattgtatatttagaaaatcccattgtctcagaccaaaaactccttcaactgatgagcaaattcaacaaaatctcaggatacaaaatcaatgtgcaaaaatcacaagctttcctatataccagtaatagagagccaaatcatgagcaaactcccactcactcacaattgctgcaaagagaataaagtacctatgaatacaacttacaagggatacgaaggacctcttcaaggagaactacaaaccaatgctcaaggaaataagagaggacacaaacaaatggaaaaacattccatgctcatggatagagagaatcaatatcgtgaaaatggccatactgcccaaagtaatttatgcatttaatgtttttcccatcaagctaccattgacttcctttaccaaattagaaaaaagtactttaaatttcatatggaataaaaaagtaccccgtacagccaagacaatcctaagcaaaaagaataaagctagaggcatcacgctacctgacttcaaactatacaaggtcacagtaaccaaaacagcatggtactggtaccaaaacagatatatagaccaatggaatagaatagaggcctcagaaataacaccacacatctacaaccatcttttctttaacaaacctgatgaaaacaagcaatggggaaaggatcccctatttaataaatggtgttgggggaactggctagccatattcagaaaactgaaactggactccttccttatgccttatacaaaaattaacttgatatggattaaagatttaaacgtaagacctaaaaccataaaaaccttagaagaaaacctaggcaataacattcaaaacataggcatggacaaagactgcatgactaaaacaccaaaagcaatggcaacaaaagccaaaattgacaaatgggttctgattaaactaaggagcttctgcacagcaaaagaaactatcatcaaagtgaacagggaacctaaagaatgggaggaaatttttgcaatctatccatctggcaaagggctaatctctagaatccacaaggaacttaaacaaatttacaagaaaaaaacaaacaaccccatcaaaaggcgggcaaaggatatgaacagacacttttcaaaagaagacatttatgcagccaataaacacatgtaaaaaagctcatcatcactggtcattagagaaaggcaattaaaatcacaatgagataccatctcacgccagttagaatggtgatcattaaaaagtcaggaaacaacagatgctggagaggatgtggagaaaaaggaaaacttttacactgttggtgggagtataaattagttcaaccattgtggaagacagtgtggcgattcctcatagatctagaactaggaataccatttgattcagcaatcccattactgggtatatacccaaaggattataaatcattctactataaagacatatgcacatttatgtttattgcaacactattcacaatagcaaagacttgcaaccaacccaaatgcccgtcaatattagactggataaagaaaatgtgcacatatacaccatggaatactatgcagccataaaaaagaatgagttcatgttctttgcagggacagggatgtagctggaaaccatcattcttagcaaactaacacaggaacagaaaactaaacactgcatgttctcactcataagtgggagttgaacaatgagaacacatggacacagggaggggaacatcacccactggggcctgttgggggttggggagcaaggggagggatagcattaggagaaatacctaatgtagatgacaggttgatgggtgcagcaaaccaccatggcacatgtttacccatgtaacaaacctgcatgttctgcacacgtatcccagaacttaaagtataattttaaaaaattagcaaacaccagcttaaattgcagttaaaactacatagtttaatggccaggggaaaatcaactgtaaacaaacaaaatcagtatcttttcataggcagcattttgatttagcatttgttgaaaataaaattcaaagcctctcacagaaaacctgcctccttcagaaaaatcaccagttttggagcatgtgtgatcccattccagctaatatttacagtagcatataaaacagctacaaataagtcacatcttcattgctacattatgccaaatgcttaatttcccattttatgttcccttgtcaattctctcctgcttctctcctgtataatcacagttgtccaattgagacctgatgatcttatcagtcatgcacttttactattattatttaaatttgctcctttcaactattatttattgccaagctttgcagagggaagaaaacagacatggtaaaagaagagtaaaggtgggtcttttctcttttggcagtagcaaccagaaacagtatgaaagcaatggatcatgaagaaaagcaatttcctacttgagggattagatagtaccctcttttgtactgttaaatcaaagttttagttattttttccaagtaatactgattttttcaatttacataaacagtctctagggaaactgcaagagacccccaaacacataccctctcagccaatcaacagaaaagataaggaaaatgaaaaaaagaaaagaaaaaccaaacttcctttatgttgtactgctttgagcaaggctttacacagcatggcaaaaattaaactgctacacaagcaaaagataattagcttaacagggaagaatttgaactgatacatgaagctttttttttctttttttcagtaaaagtataggtgatttttattttgaagcagttcacttttgctagcattagaaaattgaaaactatgtaaatttcagcaaatgtttgctttaatgtttaggttcacattgatattaaccacagctatcagttggtaataaattcagatttgagaaaatttgtagcagaaaactactctgaaatgtcatgtgaaaatcctaatcaattttaaatgcatttacattcatggaggaataaaacctactcttaaataataaaggaaaataatagtacatgtataaaatgtgaggaaggaaaatcatgagtctattttcacagttcatttgtaaaggtttatcacttatatgacgtatgtttaagaaagttacaaattttctatagtgaattacttttatgccatataattaacaacaaaaagtcttcatagctaaataataggtttttgataaaaccttataatttatttcagcttattcctgagttgcccagtttttaatgtcttaaaatccatcacactgttgacagatacttgaggtaacattaggtgattagctgacaaagttctagctactattttaattgcctttttcccgctttgtcaaaattctgatgctattaagtcattgttgaactcatcctatatagacagtaagaacaaacaaataagtaaattaacatagcagacatttcttgctttacatataactggagtaatgttttctaaatctggtggaacaatctattgaatacactacaaattctttgcaaaaatgaaatagaataaggaactatgcagggaagccaaattagacgactgcaggtctgtagccaagtggaatataatttgtccattacaataaaataaccttagaagtaggttgaagtcatttagtatggctgaaatttggagggatgaatgttactttcacccaacataaattccttaatccaatagcagataataagaataggttagttgggtaaataaagtttgaatccactgggttttctcggctggacactttttttttttttttttacatccagagttggatttgctgacaggttagagaatgcaacgtatgttgagatttcccagattaaaaaatatataaaaatgaaataatttgtaataagactcagatccaggactaaataattcaatagtctcctatgaattactaggtagtatctatatagaaacaccaagattcatcttaaaaatcagtgactgttcagtcgtaatatttttggagtagccctgtccttggctcactagatggggctatcaacttagacaggctgttgtgacagagtaattctagtttagtattcaatatccattctgccttcttcctggcaagtagaaccatttgaaaggatgagggggaagtgcacagagtagcaatatgtcccactaaaaatacttgctttccaaaacatccttagagtgagagtgcccttgtgacccagttaatcttgaaaaaatgtaaattgaatttacataattaggacaatattttcttaaaggtaggttttggtagactgtctcccccaccccactattttttgccataaaaccttattcctgttgctctcaatgcagagtgaatgcccacgacaataccaattctgagatcatgaggtcaaaaatcacacactaaggatggagaagaaagaagacagaaggagcttaaatgtttgaggtctccctgcaggagttataccagccctgtgtcacctacctttggacttcttattcaatttgaaaactaaattatcagtttaatcctatataagtcaggtcttcaggttttggaagctaaatacacgcctaatggatataactattttcttgaaaggatgattacttagatgggtgagtacgccagctgaggcctccaggcgtctgggagagacatttatccttaaggaaagtagggaacatattatttgctttgggtttctccagatgcattttaggaaagttaaggtactttctttaatacaggagcccattagaaataataactcaaggagaataaggctatcctcgtctcttgaacagaagaaaatgtcgttgagtaaataatactatggaactaaagaaatgcacctatagtccccttcttaaacatgccataaaaaaggaaaagatatccatttcctgtagaagagaattagagcttaatgaagacacactttcaaccaggaggtatctgatgtgggcttattagtaagaaacacatcttcccaggtaatacaactacatgtgagtaagtgcagcctgccatacattctttcatccacttaattatcaatatatcaaattatttatttatctagcaaatatttattgagcacttactctgcaacaggatctgtaccaagccctggactcattcagaaataaatgattggggggtttggttctaaattgaggaaacaagtctttgggcttactgcctcctcatcctgagctgggcagatccccatcctctcttgaagtccatgaaagcatatctaccttctgacatgcagaaatggccctgcaaatggaatctaactggagctgaatgagtattcttgcctcagttaatgtattttcatacttagccagttccaaagcaacaatgtgcacaacttagacatgcttattggccaggtgcttaccacctatttggcaaatgctgtttatgaagtttttaagaaacaaatattgatccaaaatttcccttgcgtttaatattctgtcattctgcaaggccagtattaagtttgatgtacacatacaattacctgtctatctaaacagtttcaactgccctaattcttgggcaccacaccgtgattaaatgtatacaagcaacaagttcttgatttgggcagctagaaaaccactgtggcataagatcaatagttacaccacttagcaaagactgtctttgtcattgcttcctagagtcctcaaaggtcctgataaatacttaaatctagcttgttctttcttttgtgcacatgttgttcatgcaaatgaaatcaaaatttacctaggaagattccagaggacccatacaggacagaagattgtttaaattatggtagagctcatgaaacacattttcaactggtgggatatcctccttatgagactcccaaattctttagagcaagaaacattaacaagcataaatgaaaaaaaaatcctgtatgaagaattgagaaaatagcataagcacagtatgaggaagacctaattctatagttgttattacaaaaaacctggggatttttactaaacaaaaatgtaacaggcaaatttgatggaccttttagcagaaatgtttgtatgaattgaattctagtatccagatcatgagagtaataatcatttttctgaactttgcataagacacacacatgaggtatgttggacatgccatgtgctcattttaaaagatactttgaaaaacaggtgagtgaccagatggttataagagccatattcagtctaaagtaacagagagtaaaggagatagaatagacatgctcaaatctttaaggattttcatatagaagagaagtaggctaattttttattggccttgaaactataggaaaggccaacaggtagaaataggttaataaggaagcacatattgatgatactcaacatacatgaagtggagtttccagaaagcaaacgagtgggggtttggaactaacctacattcccacagggagtttttggtttttcccctgcctaagatcttgcctctgaacatttctttagataaagaaattatagcatttgtaataaataacaagatggctttaggtttaattgtcagccaagaaaacagagtaaattcacatgtaagagtggaagggaaggagcaaaacatcgacattgtgatacatttgggtgtaccctgactaggcaaataactcatcgccaagtaccttcccagggagtcaggtaaccactaataagaaaatagacttatggctataatcctatatattttcattcatatgtctagctcagagaaagaggtgagtggtgagaaaaatcacagcaactgcagacaagggtctataaaaggacatttaaaataaaccaaaaaacccgaatgaatacatttacttaatgtgtattatatatagcctatatattttttattaaacacttccacacttaacactgtatctaccaaactatcagtttcagattaagcttattaagtgtactctgtttgatcataagtataaagagttttctcagcaataattcttattcttccatgccaaatcacatggattgatcttacaggaagttaacaaatcctatatttccaaataaataggcccaaataatttataatgtgatggtgttacttgtcttctatattctggtagaatcgatggacagctaccttatgtgctttcaatctggaaaagtagccagtttgtgatgttctttttgatttctgactataatttccctccataatattccctgttgtctgaaacacctacatatctgaagctaacgggcatctttatagtaagtgatgctgaaataacttctgacctacagctccaggaagagtggctaatcgaagtaatgatcagtgtctcttctacccatttctgtgaactctgatgctttctgaatgtacggagactggtcaagatgttaatctcccagtgtagggctggaggacagtggtagagaaccactacatcaccattgggaggagactgtagtgtgaactaagcaaattagagaatgtagaagaaaggccaaaaggaaaatataaaatgaataatggccatggctaatcgcaaaggtaaatgtatctcttcataaaagaaatttactctatttattgaaagctgacctcaatttctacctcttttcattgagactccattatctactcctatactctcttcagttgttttctctgcaattttgttggcatgattttagttcccatgtattgttattctatctctgcatgtacattgtccctccaactatattgcaaatacattagggcagggtacatgtttgatgttgttttgagtctccattttgtcagcaggtgtttttcttcttcccaaaatgcagcctgccagccacttacaacattttcccataaagccatggtttaatattgtacatcaccctggacttagtgaatttgtaggatgtgcttaggaatctgcattcttaacaagaaactaagcaacaccgatgctcacaaatgtttgctagcctaaggcctaccacagaacaggtgctcgtaaatgtctggtgctgctgttagaatgatgctttctggcatgtctgtatgtatctataaaaaaaacaaagagatgttgatttgctcaaggtgtcctctctctgccactagctagtaaataccttgagggttcatgtcctttgcagacagttctctgtatctccttctaaatttttttctatagcactaagtacttcctagaatgtaccataaataattgtttatgttaaggagtagaaagggaaaggtggtggaagaggaacagaaaaagaagatgaatttatggttgggaggcatacaagggaggtgttattcagaaaactcctttgctttagcgaacacgaattcaaaagtgctaatgaagtctcttcctaatcctttctacttaattcctttgctctgctcttgctaagactgaaaattaccctcctatgatatttttgagattactaaagacagtcttgtgtgaactgaagacaggtcacaaatgactggcatacaacaaatatgtccttagtatctgagatactaaggaactgccggtacctatttttcctcctcaaattcaatcaaaggaaatcatttccatgtcaacatgcacatgcatgattgtatatatatatgtaagtataattacttcaagtggataaacttagcaatgatctttgtcgattgagggcagtgttaatgagctgtaaaatggactcaccctggtgcccaattgtcttttattacaaagggcattctttaacttccactgaggtctaactcccacacaaaccttctgtgctttcatttgattattaccaatagccaaaagtcaaaggtggaaattgagacttaagaacatgttgcttacacccaaagcaacagggaaatgaggctttattgcctctcttctttaggcttcaatactatcaatgttgagaaaacccttgctctccatttccatttgattatcctgagaatatgccttgtactcaagaatttctaacaaaaaatcaaatattttatttttaggaacagaaagacctatatacattaaagattgtctaatcactacaccttaattatggggattatgtggtcagttgagttaagtgatttattcagagttgcaaggttaattaaattatagaccagatttttatcctgggatctacgaataagtttcaagggaaggatgaaccttcaaaattttatgcaaattgtgtgtgcacagctgtgcatttttttcatctgtgcatttttatggaaagtggatccacaattttatcagaccctcaaaatgtccctcaacatagctgggacagttactgttgcaatttataagatatttttatatttataaaatatagtaaaatattaaaggtcatgtaatccaagcttacagccaataaatggattccttaaataataactctgatggatagcatgcaaactctaccttgtatcttaagataattgataaccaaccacctctcatgttatcatggttcaaagcttgaattaaaaaggtattcatatagctgaatcatattatttctttcctataccttctcacattggtctaagtactaccctttgcagccatgagaaacaaaatcactgttgcttactccaatgtctttcatacatttgaagtaaattcctgttacatttcttcttcggtcataagagccaagatccctcagtattctagtcaccactctagactcaaacttagagctggaagaaacacatttcagtttgtcagtattctctaaaatccatataacaaaaaacttaaaaacaatgttctacttgtgatctgacttgttgatgactatctccttctggtggatgtgttctctctttttgctggggaaatcatggtattttacggtctaactgggaagatcagagcctaatgatttttatataggttttccacctgaaatgcaacaaagtaaataatatgcagctggccattcagacccaactctagataatcacatttcaaactttaatagtcatgaggttcacctaaataaacactggcaatttccaaaagagaaacattaagcacttttatttagatgaataatccagtactttgcccagaggttgagtcagaaacaaagaacaaaaaacctcagatttataaaatgagtacagcaaagatgacttagagtataaagtttttctatttcaaatgtcagaaaaatgctcaccagatttacttgattacaaagttccaaaaaaccttttattttgcaatactcactcatatcgcaaactttagtgatgtagcaacaattatgcaaataatttaaacaaagtaaatggactacatgaaaaattcaatcctcatttctatattgattatttataccagcactccccaaagactgttagaagcaacattgatcctaccaaatgctcagaaaagataaaaggccaacaactgaatacacttcaaaaacacaccttaccatacctgcttcttgggactcccactgcaaatgacatattttagtctccaagaacccctctttttaatgacatccattagcactccacaacaccattgttccttataaaagacattgagcattgctataccatgttgatctaattaaccaattttctgcaaatctctactttactctgtgttttaacatctcaacaagtatgagtgtagactcttgggtaatatgatctcattctcctctatgagagcctcctctgcctggttccctgtgagccaaaccacaccccaaggaggagttaatataattacttagattagggcattgactgttttacctaaagaccaggatgtccatatcagatttattttattttattttttattattattattattattattattattattattattttgcctcagattgaggtagaagactctgagactgtgagatcaggataaaaattgttgttgatattcctcttccactcccggcagctggatctctaattgaactcttctgctccctagctcccatactctcacttgcaggaagatataagaacaagagtgacaaaaattcaaatttgcaaagaaatctctcttaaatttcaaggtcatattgggtgatttaattcaatttttatagagagccctgaatttggaaagaaagaaagagagagagaaagaaagagagagagagaaagaaaagaaagaaagaaagaaagaaagaaagaaagaaagaaagaaagaaagaaagaaaagaaagaaggaaagaaagaaagaaagaaagagaaagaaagacagacagactagtcacatattctgtattgttttctgagaatcctggggagtaggggttactgaggatggtattaaaatcatttgcaggtcttggctttaatatcatcaaattagccccaaagttatttgtgattattatttgcttttgagttcttgtattttaaacgttatcattaaaatatttgcaggtagataaggaaaagctccagatttgcttcaaaatgatgcagttggaaggtagagattgaaagggttagggttacacataaaatggtagttagaattgcacgatggaggctgggtgtgggctcacacttgtaatctcagcattttgggaggccgaggtggggaggatcacttcatctcaggactagcctgggcaatatagcaagacctcgtctctatttcaaaaagaagaaaaaaaaatagccggctgtagtgggggcacacctgtagtcccagctactccggaggctgaggcaggatgattgcttgagtccagaagttcaaggctgtagtgagcatgctattgtgctccagcatggaggacagagtgagactctgtctcaagaaaataaataaataaataaataaataaataaataaataaataaataaaattgggtgatgatttcatttggcttccttttacttgcctgttctcttacttgtgtgtgactgataaaatctgagattataattaaataataaagcaccaaaatctcacacagaactatcaaccatcataaataaactcatagacataagtggaagagttggaaagtttttgccaagtggtcaagatgttcactgctgtaactaagagcttccactgaagttactattatcaaccacagcactcataaacacatagcactcctgggcacattttctatttatttaagtgacttaccttatttgatcaaaaagaaaatattaaaatcaccataaaactatgtaattagtgattgcatggtgatctttatgtgatgaaatttttaacagttaatatctaatatagaattaagaatcctacacaatattttaaagttatattttcaaatccatattttgtggatttcaaataattccagtttgaatgcttgcaactgcaacaggtttctgtaaaagcttttgagtttcacagccttccttttgacagatttcttaagttatggaatgcagccatcagcagtctgtagaaaaatgaaatgctgcaagtctatttttatgcagctgggatcaagttactaaatggatcaaaagaaataatttctttgaagaggtggctgttgacaccagtgccctaaaaataagtgcaattttgtgggcataaaaatttgtttatatcttagtgaaagtaactatagatatattttctatatatacacttgcattcatgatatattggatgccattctaaacatcttttaatataccttagtttaacattgcttttaagaggaaagttgcatgctttctcttgaataattgatgtagctaaagacaattattcataccaggcttagcttactgggtttataataaaaacaatgatagtaatttacctaactcttactttgtgccaaataccagccaaatacttcccaacattatttcatttgattttagaattacattttattttaataactagctattattttcacaattgtatagatgaagaagctgattcttagagagtgtaacttgccaaagattacacggctagcatgcctctgagttaaaatttgaaagctagtctgtttaattctgaagctcttaatcactaaattttatactacctctttaggttggatggcatatcaactgatttgaaactatagaaaaaaattaggaaacagaataatcttttaaaatatctttgtatgtgaaagtaagcttgcttatagaaaatgtagtaaattgaaagactattactattgcaatagcaatagtcaaactgaagcctatagaactcaaatgcatgtaagtgtcaaaatagccaagtaataatgcgatatgatataattttttatcataataaaaagtcagaaaacaaaattcataaagagggctctatgatacaagaggaaaggttgatctaagggtacaaactaaaacattttaaataaagtttttggaaaaaacaattttaggctccgaaataagaaataaatacaaccccttcacagataataataaagaaataagccaataagcccttaaaatagaacgatatagtcttagctctggaggacaaaatattctctacttggaccctgactcatttagaactcctgcacataaatacatatatatatacacacacacacacacacacacatattgactatattgctgaaggggagagtaaaggaaatggtgaaaggatcatcatttttattatttcattaattcctgaagaaaacacatacacaaattgcaattgaagcttctaaaaaacctagaaaacagtataaaggacttagacacagtacaagtatttcctaccatgtaagtctgaaagagagaaaatcaatttttatgaaaacataaaacagtgatttgggttgtgaacaaaattatttgtctccatttgtgttctattggcttactgctctgccaaattttgaagcaaaatgaaaaaaaaaaaaaagagagggaaattatagcaaacctcccaaaacatatcccttaaactccgcaatgtatttaaactacccaggttctgttcatggatatactcaaacattgagaaattgtgggtgtactgggttttgatgctgtactttttgtaacaacttgatattggagtcaaaacatgtttttctatcttgtgttgctcagaaaggtatgagcaaatatatttttcccacaaatttcaattaattaagaatgattaaaatgtggatacttgcaagggaaacattaataaaaacatgaagtgtagacatagagataattttctctgtggcggatgactgatcatgtcattaggcagagctttgttcccttaggctctgtagagtcagagctaggataaagaatcacagatttagagttgaagaaactcttaacaataacttaacaaccattccaatccccttgatttatagataaggcaggttagtcttagaaagaggaaccggttctttgtgtgagactcaacaagtcacatcaccgctctgcgcttctgttcccaaattctttttctttctttctttttcttttcttttctttttttttttaaatgagtaagggatttcctttattattagtgagattgaacatcttttcacgtcattattgaccatttttatttttctctacaaactgattatccaaatctttctcccatttttttcttttaaaaaattaatttaagatccaagatacatgtgaaggatgtgcaggtttgttatgaaggcaaacatgtgcgatggtggtttgctgcacctatcaacccatcacctaggtattaagcctcccacacattagctatttatcgtgatgctctccctccttccaatccccctaacaggccccagtgtgtgttattctcctccctgtggccatgtgttctcattgtttagctcccacttataagtgagaacatgcagtgtttggttttctgttcctgtgttactgtgctgaggataatggcttccagctccatccatgtctctgcaaagggcatgatctcatcattcctttttatggctgcatagtattccatgatgtatatgtgccacatgttctttatttaatctatcattgatgggcattttgattgattccatgtcttttttattatgttctcacattcttaaaattaaagttgggactagttgatctccaaagtgcccacatactaaacgctgaatggtttcaaaagaaaagtgagttaatggcagacaataacctcagatctcagttcctaccttgttctcaccagtccagtttgtgttctgccatttgctcatatatttcactgtcactacgtacttatgaaatttgtaagtcaataaatggtgaagaaaagaaaaacaagaaaagtcatccacattttagaagggcaaaattgtgagtaaggagctgagtggttgaatccgaatattttcattaattccaaacaaaggcaatggaaagtgggaaggaggggaattgcagttctataagctatagttgctccataggagaaagggaagagccagcagtaatcaggactttttaaaagaactgtccaagttcaatgacaatatcatctagctctctgactctaggcatctgccaagaatcatggaatcttcatctcagtaaactaaaaccaggctagacaaagcaggcacaaagaagaagagaatcacattcaataggttagtcagtatatggtaagctagatcagccatggaaatatgcattagtcaataagtttgatacctaaatcaatggagacatggtctaataactgacctttcattttttggggtgattttcataggcatacatgtttacatagcaactccatgagaatttacaataagtagatgctgatattcattgactattcagatagtcttcaacttaagatggggttatctcctgataaactcatcgtaagttgaaaataagcagaaaatgcattcaatgcacttgatctatggaacacaatagcttagcctagcttcaaatgtgctcagtgatatgagcttacagttgggcaaaatcatctagcagcacagtactctgtagaatttcggttgcttaccctcgtgattaggtggtttactgggagctgtagctaccagctgctgtccagcatcttgagagcctatgaactgctttctacccacagttgcaccaccgtaaagttgaaaaatcctaagttgaactgtattaaattgggggctttttgtaatcatttaggagtattaataatatgtaaacagtaagagggagaaatatacagcaataaatgcagatggctcattcctaatttgagaaacaagataatgcagtttattctgaaaagtgattataaatttgaaatttatggaaggaattcaacatcaaacaggtaactttaagagggaaactcttcctgacccttagctagactaagttatgttcagataaagcaatctgacttcacacacatatgggttgccggacttttctctcacttacataattttgaaataatttgtggaatcatttgtttaatgtaaacattcttagattttccagagagattatggaccttgccttggtcatgggtgtagtcccagcccttagaagagtatctgtcatgcagcaggcattcaaaaaacatttgtttaatgaagaaatgtccatgctacaatatgtttgaacagaggagagggatagaaagaaaaaaaaagactggaaaagaaagagagagaaaggcattattcagaggaagaagataaaagagatgaacagagactggactatccccatgacattcaaaactgaccaactgactctttgtttcacacattgagtgacccaggtcaaagccctatcagtcagtatactcactttgtatccctgacacacatatattttcctaagaatggttgcagagaaaggctggaaaaaaaggggatggaaatgaacattaaagagactgacagggaataataacagtgaaacagacaaactctattgtgtacaactccacagtcgaacattttctacctccctgagaatcagtctcgcttgcaggtagagtattgactgctaggcagagcaccatggctataaaacagaccactgagctaggcaataaaagagagagagggagagagagagaataagaggtctaatgtcttgtttatgtcccctttatagcatctttgagaggctctgcagtcccacagctggctttagttcatatgcttttctgattaaggcaatacgtaccaaagcaatctaatattaacgtgcaatttagaaaaaaatagaagggtgtaaaaaaggaggaaatctccacaaacagtgtaactaaacaataaacagaatacaagacttgcttaattctttattaaatacatgctttattttaagtccctaaaacatttgtatctcattttaaacacccagttctaccatattgtgtttagtgacactaatccttctttatagcctaaccctttgagaaataagattatgttcccagtaaatagtagtaacaagttttattataacaatcctgatcacagatttataaaaaccttaaagaaaaaacatggaaatagaaatggctaggataatatccaatatgagaaagatctttatttaacatgaagtataaagcttggctgatgaaatgtctctaagaatatttccaagaatatatattttttacttttcattaagaacttgactactctttttaatcttagacattggttttatgctttataaccttaccattgtgaaactcagcgagcctagagaagtttgggtactgtgtgcaaatctactcaagtgtttagcttaccacattgctgagaaatgaccacatatgtgtgtgtgtgtgtgtgtgcgtgtgtgtgtgtattttttttcccaagagaatctatcttaactctgctgattatactatataacatatcatgactatcttaactgtcaaaatggtcctaaggttttgacgcaactgtttcaaataaacagttgttttcaattcttttttatatatttgtatctgatcttgagatttagattgataataatagtagagtggttaagtgaagaaatttaagagtcagagaggttataattctggctcagccacttactatctgactgagcctctgttttctcatccataaagtgggaaaaatacctagccactagggattgtgtgaggattgaataatgtgccttgtgcaaagaagacagcacgtgcccaatacataatgtgcactcaataaatgatagcaatttataactacaataagtgattgttagtattaataataaaagccacccgttatagtgcagtactgttaccataacaaagcctgatgtctatctcaattctaagaaaggctattttctacctcctgtcttctctgaatttctacttatgccatattatcatcaccaataaatatttcttgtaagcctaataagcataaggtattacattaggccctctaaagaatacagccagaatcaatcattctctcatgtgggccactaccagatctgtacttcctctatcatagcagcaatattctatatagtgatgatttatttgtctctatttaacccactggatagtgtgctttcatagataagtcttactctatattcccagcacccagcataatatcagggacataataaatgcctatccaatgcagaatgaatgaatggaacatggataagcccaaagagttcaggttgaagagagacattatggacattcaaaagcctagagaacaagacaaagtttcatatacttatgaggaaaaaaaaattgccttctctgtgtcagtgaaatgctattgttaattcataaatgaagtagtagtctcatcacgacagtcttctgggtggtttcatcttatattgtgaacaaaggaatgggtggcagaagagggaggaagaaactcttaaaggatgaattaccaaagagtacctggggaaacaatgtgattttttactgggcttacggcatgccaatcttgttagttttgcgaataaactgacaagtagaaattggaatttagtgagaagtctaaaggggactcaggcttttaaacacacacacacacacacacacacacacacacacacacacacacacacacaatctgcttttggctatgaaaaggagctagagtgatatagaatggcatccaagagagtaatgcacatcagaagaaactagctccagatactattaggttggtggaaaagtaattgtggtttttgccattactttcaatggcaaaaactgcaactgcttttgcaccatcctaatagttttaaatgcaaggtgcttaaactaattgtagaaccagccttcttggccttatcaatcaactagcaaatatgcttcagtgtaagtcaactgatcagagggacttttgccaggagtagtttcagagattctaagatctggggccatagatgcatacagtaggaatgatttaagatgggtctttagtgtagaatcctatgaattccagagaagactgttacaggacagagaagttatttagtctgaccaaccaggactgggcttgaggtagtttctgaagagggattctgcaaggcccagagtagagcagagagagttgctcaatctccgaccagaactaggagaactagtttaaaaggaagttgtaagaaagacctattactctatttatgaatgaagtaaaggaatgaagaccttacaagaaagatcagaaatccttatcactagcatacaatgtctactatacagtaggcaccaaatatcatcttgttaaattaatttgttgttgctctgatacttccccattgtattgatttatctttaaatgcttatcatgattttaatttggaaataagaatagtcttctcataatattggagtgtcaagtgagaaataacaaattgtggttagacattgacaatctctgataatctgtcaagacttttacagactttacttagtttaattatcatgggacgtcagagggaatatttacaccagtggatactagaaaaatgaaaaatactggtttcttcaaaagtatagggaaacaaagaggaaacctttctcctgggcatcatcacttatttttctttgatatttattaagtgcacacagcattccaggtctgaaatagcctatggccaggaagcttctcctcctggactggcattatttctccctagatagagagttatgaaactccaaagcggaaggaaaagttcagctgtatacgtatcatctgaagttccccatgggcagaccagttctgattcaagtcaggacgagaagagattagcgagtgggaagacagacatacggtgaatgtcagttgtctctgaatcttgattctaatgaaaagtcacagcttttactggtaatgccctgaagaccaggctaactcagagataacctttgcttaggaagacttcttgagccgcctcaggttcaccatactttttctcttgctctgaatcctcctggtacttatcctcacagtatctacctcactcatttgcattatcttgcctttttttattttagaattgttcccatcatcatatatgttcttggtcacaagcaacttgatcgtaaataatattaattttccttatgatctgattctttcagggccaatcaggttgtgcagaatgaattaatgtgaattgaaattttcctaaaactttgaatcccaacttaggtcttcctggtatactattgtgaggatttcagcagagtacaactaggacagaatatggtctggtctgatcattcagtattgaattgacctaggaaatactctagaagatacttggaacccaggtatcacgcggcctgttttccattcagattcaccatcatcagttagcgtaggagaaaaagggcagaaggaagaacaagaaagtaaacagctgctaccattaagaggaaatctccatacagtctgagatctcccaggctcaaaacacatgagatttaaaacaaaaaaaaattcttttaaagttttatttttagttaatacacaataattgtacatatttatggggcacaatgtgatgtttcagtacatgtatacattatacagtgatcaaaatatattttaaggattcccttcaattgtgcattggccacaccccctactatggctttattttcttctcagaaagaataaacctgacaaaagaaaactaggttaagagtgggaagaaaaatgggtcctggtactccctgaaaataatatacatttgacaaatcttttacattgcttctctccataactgtaaaattaaaattcttgagcggaatgatcccttacagattttttttcagccctaatagtttatgctgctatgattctagctaatcaaatctactcctgacagtttctcaccactgtggaaagtactacaaaaagaccagttgggaactggcagctaatcttccatccttctgatagctttgctgaaaagccagttcaacttaccccgtttatacatgttgaacttgcctagatgcctgacctttgtcagattttgaagagaagaaagtaaaggaaaggagaaaccttctctccatccaacttttactacacatgaagtggtaggtcagcattaaatgactttttatctgtttctgccttgtgtatcagaatatggattttcctaagtgacatcaagcttaaaaaagaaattagctagtaaatgttttcctatctattgacacaaagtaaaattatgatggctttaaacaatgcattctcagccgggtgcggtggctcatgcctgtaatcccagcactttgggaggctgaggcaggcggatcacgaggtcaggagattgagactatcctggccaacacggtgaaaccccatctctactaaaaatacaaaaagttagccaagtgtggttgtatgcgcctgtagtcccagctacttgggaggctaaggcaggcgaattgcttgaactcaagaggtggaggttgcagtgagccaggatcatgccactgcacttcagcctgaatgacagagcaagactccatctcaaaaaaaaaaaaaaaaaaaaaaaaaaaaaatgcatcctctacataaggtattgtttagggcccagtttcagttgctgattgtccccttctctactaaattcttcaggtctgtaggtagtactctttcccatgcacaaatacccaactaatcttcagacttggaaactccacttaatgggttgtcccaacattttctttaaatccatgaatttcacacttacttccttttttgttcaatacttcaaaaaaattattattacttttagagccacatacaaccctgtcttgcatctcttgtatttttctccacctacacatgggcctgttttctttgattctcccaggtctatcccagctgctccttagaatcattcacccactcaactcttggcaacttctacattgctgtcccttaatcttggaacagccttccaatcaatgtgttttgagccacctcctaacttcagaaagaaaattcctcaaactccatctgtttagagaccatctagtttcaatgatcagtctcctcaccattttgagaactcttctaacatgttgaaatgtaaatactaattgttttcacataaaaattagcaagcactttagcgtttaatccaaacacccccaagctacactttgaatgaaaatcttcaatttcccccaactttcccattttaaaaatgggattgttttatgctgaagttaagaaatgaatctccattgcagtctgtgcatcaatgcatgagtgaaggaatgtttgcattgctttgggcactgtagagcctagacactgttcatgtacacatggttaacaatttacttctctctgcagtattaaatcttctcatgtcagagactaatagatcacagcatagttaacttactcaaatgacttccttaattcagtactgccagaaagcatttgaaagcagcaaatcccagaagtcttagtgacttctacattaagctaatgaaacgcatgtattcatgctacccgggaatgttggtggcatgtggcttacacctcaaaccaacactctcagtgggtaaaccaggagtggcagcgtgccattttcgtatttcttttcctgagctgcacactaccaccactttgatttctatcacagctgattccctttctaggaaactttccaagcttgttctcacacagcctaagagctgccttttttcaaccttcatcacttagaataccaacaatcaacatcctcatgtatttcccatactggtcaacaattttatcaatggctttgataaaagtaacagaaggcatgcctcttatatttatgaatgacctcaaaataaaaaacgtcaaccttaaggtaagtaaagttcagaaatttcctaagaaaaaaataaaattatttattattaaatgtatgtaaataaaactttcttaaaatatgcactacgaaaaggtggaataaaatatatcaaactaaaatagtgatatattttatcactaaaataaataactaaatatacatgcatatatatttatagatgtataaatatctatgatatacaaatgtctacatagatctctacataaagtttttctatactttccaatttctgtttaatcatgctatagtactttgataagaaaaatatattttaacaagtcattcattattgaaatgcattttgttaaatattaaagacatcaatcatacagaactgatggttgtaagcaaaatatcattttgctatatttgacagagataaagttaaaaatttctgcacttaaggtttaaaagataaaatctgtaagtgcaaaatattggagatttgtcttaatagtaatataattgaaaattatcttagatttttttttcaaattaagagtgatctcaacacaagccaatcatgagatttggctgccaaaaaagtaatggttcataggaggtaatttcaactaatgagtcttacagaagtaggaattgagcggttgtctttttttcagcaaacccagaatgaaagagcaaagtcataataagattatagactaataagatgaatataagcaagtatgcccaacaagcaatagaacccccaaattgagaccttcaagcaaattgtgggggcaaattgacagggagctactgatggcatcttatgcccccttgcaacttcaatgattcaggataccaagttgcaatggaaatgggaatgacagttattgcatcctgtggagacaaacatatacttcccaagaatgaagtgtgatctgtgtagtgagaatactgggctacgcaggagaaatactgaattggtggccttgagcaaggcacttagcttgcagttccttaatctgcttgtatttagtgttatgctgcccaggggctggacaaggaactggatggtttataaacacaattatacctatgccttatacaatactccatgagagctaatactattttcaatttatagttgacagaacaagctgagtgatctagtgcatagtatccgaagtttttttctaaagttagcattccttgcttcattgcaaaaagaaaaattagagccacctcaagtttcaaatctgatcatatagggtctgattcacccaatggttcctcacatttttcatgtgttgtaacttttatccatgaatatacaatttgtctggtattgtaataaaacaatagactttcaggaggaatgaaaaggaggtggtgaaggaatggaaaaaagtttcctttaagtaaagctagagtaatctgcttggcattcctcacaaagtttaaaatatatcccatttataacaattataatggacttcagggtgggtggggtaaattgatgagagataagaaaacacctgaaaaggtaaaatccatttctagttaattgttatcaattaagttgtttttctctcactgggacactgttctcagtgccctcaggccccaactacttacagtgaacagaactaatagcagtcagtttcattatgtctccttaacaacacgggaacctgttgtcctttaaaaatatataactgttttaacctttacattttttatttactcatacctaaatagagaacttctgctaaggtaggagaagtgaataccaagttcagctcaattcagttagttgtgctaaaggctaaaattacaggaacagtatgaagaaataattgacagctgaagtgcatggtcctatgaagcttctcttcggggaatctgtgattgctcttaatggcattttcaaaaaaaacaggtcctgttaattttcaagatatttttaaacactcgattacttttaaaataatcagcaccattatgaactcccaggaggctgtgaattaagaaatgaatacctttattttataacattttacaaaacactcactgtggacaataaatatcaaatccactaggggcttgggtaatgaaacacacgtcttgaaaaagtaaaactgaaagatgattagataattaatcacaattaaatttctcaactgattttgaaggagctaaacacaagagagcagtccacagcttcatcttttacttgaaactttttgatgcctcaaccccttacagatttaaggtacatgctgagtaaaccattttggagaagaaccaactataccaggtagaaaaactacattttgggcaatctggggtggggagtacaggcatgattctgaattatgccattcataatacagtgaagtaaaatagactgattatgaatataccatgtacttgaattgtccttgcagtggcacagggctgatatcaaccaacacaaacaataaatataatgtacctacatttctaattgtttataatgaccatcaaatatgattctagttctaatctctttgacgatcttctagaggtcataattctgtggaggacttgccttagctcgggcaacactgagaatccagtacatgtgtactggcactttcatagccacttggaacacatacaaatgctgtatttatctttattgccctgtatacaaaccagggtttggctttcctgtatcctgacagtcaaaacatcttccggaaatgcttctcagcaggaagttggcagtaactctaaaattgggtttctgacagggcattctctaaggagtatcgttgctttggaattataattttatgctccttagattccattcaattatattgaaattcaggatatttgttgaaaccaatcctgatactctgggaatgatagggcattcttttcttatcatatttcagagataactatcaatcattcttttagtcttccatttctttgacacccttttattgaacatctcccactaaataaaggttctctgattgattttatgcaacagcaaagtaaaaaaaaaaatattgttactttgagatgtttatagtctggttaattatgtggtcactacattaaacaaaagaaaacacatcttgtggcgttagcagtatgctgacagcctgggcaacgtggtgaaacctgaagtctacaaaaaatcccaaaaatcagccaggtgtggtggtgtgcacctgtagtcccagcttcttgggaggctgaggtgggaagacagcttgagcctgggaggcagaagctgcagtgagctgagactgtaccactgtacttgctagacacagagcgaggccctgtctcaagacaacaacaacaaaacaccaaaaataaaaagtaaatatgtgtgcaagcacaacatcagaccaaaatggtgataaacagacagattcaggcatatgaataagttgacatgtccaatgtatctagtatcagtcttctttattcctaaaatatggaataaaatatgaacaccatttagtccaatgataattcttacatagagaaagaaagttagacaataagttctgagacaatgtccaccagcatacaagctatttaaccaataaacttagatttattggttaataataataactggtatcaataatatatgaacatgtcattgatacaagtaaatctcttgattagacccaaatgtatgaaattctaatactgattctttgtcttttctctcttctcttatctatgtccaattagtttttcaaggcctctcagaggttatttctttcagttcccaaactacattaggttctcctataatcttttcttggtttgaagcatcttcgataattttaagttaataaattgctattttttatcaatgtccatcttccacttttaaacttaatttcatttagctgacttgtctgcctttgccaatatacctatgaccataggagagtaactggaatgtagtggatatacatatcgttaaaaaagctgttgaaataacccaaaccccagggaaggcctcatattcaaatggaactttaaatacaccattgctggttatacttggtgatgttatggtatctaatttcttttcgtgaaaaggttaaattaacaaattaaaatttcagactggcatgtcaaactcagaattatttataccaagttaggcaatgaaatgcctacatcttatacttgattttatatactttcttcgtcttaaatagtagtattagactgtattgagtatcaaaccataagtatgcattctttctgtaaaaatggtcaaataaagacaggtaaaaagcatggattttcctgtatgtttttatagaaatttcatgtaagctaataagttataggtttgcctatttaaacaggctttcacctggaggacaatggggtgttacaggaaataggagaaattctcataaggatgattaagttttcctaacttctcctcctgccctttttttaattccatgaatcaaaagggaagtcccctttgtacattcttcttttaacttataaaatctatttgaaaacttataatttaagagaagatctttttgtgaatttaggaacttattcctgagagcaactaatttacacaggctagtgtggctcacgcaatgacttaatttttaaaatatcaatgctgtgtaactgtactattgctacaaaagttggtgacaggagaccttggtaagtgttatggtttgactgtgttccccaaagttcatgtgttagaaacttaatctcccatgcagcaatattgagaggtgaaaactctaagaggtgattaggccatatggatctttcctcataaatggattaatgtcattagtataggagtgggtttgttacaaaagaaagtttggccccctcttgctctcttgtgctcccttgacccccacctcccctcaacacacacattttaccatgggatgatgctgcaagaaggccctctccagatgctagccccttgcttttggacttcgcagccaccagaactgtaaggaataaatatctgttctttataaattatacaatctgtggtactctcttatagcaacacaaacagattaagaaaataaatcatattagtatttcacaacctagaagagcaggaattttaagaataaacccctgaagcacagagttgatgtcatttattctaatatgctctggactgattttcccagactttggaaatgttttacctttaacttccagaataactttcaagaattttggcctccctagtagagctcagagagctaaaacagcagaattaaaaggtcttgggagtgaggcagggcagatgaaaatgagaatgttgtctcagatatgttagagagtttcacaagtttgcagaaagaaaaaaaagcaagaaaagacaactgaaagatacaagtaaataagactgagataaaatgctggaataaaagagaagatccctgagttgactgtgcattaatatggaatgggaaggggaattgaaaaaaaaataaagcctatagagcaaaattttattagaatagcaatatcataagttaatgagtttggttataactaaacctaattatagtgctttaaaaataatcttcttgggaagagaatccatgtgtttcaaatttacattacatttgaaatacaataaaagcaaccctcttaaaatatagttattagggattttatcacttattttgaaaatctaatacatgatattgaagcgttgggaacactgggacaatgttggtttttgtcacaatgcagctttatggcaaggattcctattcttgtttatttaagttccaatgtactaataagataggctggcttttagcaaatggatcaatgagtcttaatcccagatctgagactctctgttggttacaaagcttctaatttacacagaagaataagaattaaaatggtcaggctgcaacaaatggcttagggatgaatgagaaacaattgaaagtaatttcctcaattatgtctcttctctttttacatgcagtttctgtacaattcagagaggtacatacagagggaccacttcatttagtaatctatgtttccgacaataaaagaaatcttatgaacaattgacttattttcatttgtaaacatctctgcagattaatttttgctgctacttaatgaggcagattatgaaacttacttattaatttatcaaagttgccatctatgataatcattgaggtgtccctctcttgaactactatctgttcatcaccaatacagccaatcatgcaattctaaaatgatgtgatcacaaggcttacatgataactagcgatgaattcatcaaaccaaacttatttaataataccagaactagcaaaaatacactaaaggagaaattaaactgcaaataccttctcaggtaggctttttatatgattgtcttactgcctttctaattcccatagcgacctcctttgttattatcctgctacataaagagttgactgagttgaaattacttacagattatcactacaggatgcattttactatactagcgttttgatagccctgactgtaaaacattgccagatgataggatcatagaagaggaatagaaatgtcaatgcatttaagtcatgagaaggtgccttagactgcaataggtaaggtgaaaaagagatgtcttttacaaagatatgcaaatattaaatatcataaatcagttctaaattttgagctaaactctcagaccagaataatttcaactttaggggaaaaggtgaattgatatacagtaatagaggacaaagagaaagctcatagtggaagtaatattctttgtaattggtcatagttggtgcttgataaatacatgtttcatacatgaataaacatgcgaaaacaaagacgtagtagagaaaagttttcaaatgggtatcctgaaagctatatcaggactgctaactagatggtttggccaaggtagtgtattaaaagcaaaatgagcttggtacagtggtgtgcacctgcagttctagctaccagggagggtaaggcaggaagattgcctgagcccaggagtccaagaccagcaaaatgtacagtgtttaaaaatcaacagattttactttaaatcttcatttctttaaaatttggatgacatggaaacattcccgggaaagaagaaaaaggggagaactataatggataaattgcaggcaacaaacccaagacattttcaaatcaacaggtgccatctcaagagagaagccattctattgtccagatgttatcaatttctaggtattgtaatttaagggccctctccataccaaaaaaaaaaataataataaaacatatgtatactggatgttttccttctttgaaacaatttatttctttaacatccaaagcgctaaacattacgtctgtttttcttatcatactgccatttattctcagaactcaatcgcctctttagacaaagtgcatttctcacggtacctggtttctttggtcatttaatttatctgcttgctgaaatttgagtcttgtgaccctccaagtagaagttcaatgaaatatttcagggagaaggattacaggatagtgtgctgttttcaaaatacacaaaacaggaaactgttaatttaagaagtaaagatattttggctgtggaaaacagaaagaacttaagaaaaatgagaaagataggtaaaattaggctgttccaaagtctggattttttgaaaacttgagatagaatgtatattgttcctcacttttatcataacaacttcatttttactagtatttttattctctgaagtttgttacatcgaagtgttcctttagcaggaatagatagatttgaaaaataggcttaatctactatttcttcaggactttctccctacatgagaatctggcaaaattactgctcacttgctgctgacacatacaattcccaggaaaaaagaaaataagaggaagaattatgcgagaaaaatcacaggcagcaaataaacccaagacattttcaaatcaacaggtgtcatctccagagagaagccactttgttgtctccatgttgccattttctaggttttgtaattgaagaatgtttctctacactataaataaaacatctgacacggtagattattctcttttttgaaacactttattttttcagctttcaggatgtcacacgctagttctatttttcttagcttgctgaccatttattctcagtattctctgctagattctgttattttgtgacctccaaatatgagaaggctcagttttcatatctcttccccatctaaactccctttctgggtaatttcatcttgtcctgcgactacaatctatctatatgtgatgatgcttatgcttgcatctccagccacaactctccctgaaaattctgactcatgtatccatctacctacttggatgtccactaggtatatcaaaaccaaagtctaaaaacaacaacaaaacatccacttttccactccaacctcccccaaaggataaaagtcttgattttccattcgcaacaagtcttccgctaataacaccactattctcacaattaagtgggtcagaattaaagaatatatttaaattccgctttcttccactccacacctctaatctgtcggcaagtgcagtctgctctgtctctaaaatgcatgtgggattttaccacttattggcttgaacctcacaaccacctaaatctaagccaccactgtctcttttgtggacgcctgctacagcatcctaatacggttttttttcctccctcttctctgcaatctattgtccacactgcagccagagttatctttttttaaaaaataaaagtcatcctcatgatcaaatgttcccagtggctttctaacacacttagggtaaaattcagatccttttcaataacctgaatgatatgagaaggcatctggcctccttcctgctcttcctggcctcctactctttttccttcctgctcatgctcctccagttacccaggtcttcttattcttcaaacatctgcatttgctatttccatgccttgtgatcctcttcaccaagacagtcacatgactacttttcttatttcattctagggtataataaaaggtcccctttcaaagaagcctctcataatttttcctaatataatctcctattactttctagctcactttttcccatttccctgctatgcttttcttcataggtattatattatactcacatcatattatttcttttttctttgttattgatattctccaatagaaattatgttctaggaggataagaattctattttgtttacacttgcccataaagcctgacatatagttgacactcaacaaatggttgccaaataaatgaataaattaaagactacgagattgaaataccagaaaatgatcataacacttgtcctaattctttacctcacatcaaaaagtgctaaaatgtgctgtttaggaacccaacaaagatcacttaaaatattttattaaacatactcttctacaagcagaagacattataaaaaagaatttttttctacacattatttatcttgctcacatttactctgatataaaaatggattctaacgtatatatcagctctaggaaaaatcaaagcaggtcctttatatgcttgctagttttaaaatacagtctgatttcatccacttcaattgaatacgcaactaccatttccttgtactctgctgaaacttgtgaaagataacaaaatgaatcacaataactattgtttatagaacaacttaacttatgccagggaatgtgctaaaagctttacaagcactatatcatataagttcctgtgacaactccatgaggtataaggttccctatttcagagaagacaaaactaagtgagtcagacaacttgtcctacaccagacagctgttaagtggaggtgaaatttgcatccttgcctttctgatggctacattggtcatttttagtgtagaactcactgccactagcaggactcaagaacactcctggtgaccctgatgactcagttcatccaaatatgtaaatcctctgctctgtcgttagggactaaggttgttgaaggccatttacctatgtctagagtatccttaccagtagattattgaaaagttattgaattactaaaatttagttttcataaactaaaattagtacttaatagagtttactgagaattctaattcaatatcctaatgagaaagctggctgctacccaacacctgagagcaatgcaaatcgcaccctctgcaagagcacatgcaaacaggcagaactgccaaaatcttcagcacagataaaagtgtaagtggttttcaagtgccatttaaagtaacattattcctactctaaataacaaattcctgtttatttagacttcattattgtcaatttaacatgtgaaagtttctttgcttaacagtatcacatgtaatggtacttatttgaatcagaactatttgtgatctaaaattgtattatggatatatttttagatagctacacatagcaaacaatatgaatcatccacattcctgctacaaagcaaatatatacatatatcacaccctgcttgaattttactaggtagtgaattttttgttatcaagagtttgagagttttttgttttgtttttggaatgggttatgaggaattgtggtcaaaaaacgagaacttctttttggtgttaacagggctatgtctgctttgctctagtgattcctaacctactgtgcgaaggaggcatagcaaggcaagactgtttaagtataaccataaagggactcacgcactctcaggtgaagtgcaaaaatactgatcacggtgctcaaacattctggaggagtaagcattcaaattcagaaatgtaagatgatttctcaaagaaaagaggaaaaacctatcattaattttttaaaatatatcttccagagcaggtttctcaacaattttacatagaagacgagtatttttgtctccttaagatttggacttaaggtcaaagttgttgaaggttgatcggctattgtaagcttcaggtgaaacctagagaggagaagggaagaagataaatctactatcctagattctttttaagaagcagcacgttccactcctgactctcccgaagatggtctcaggtcttcaggtgaccctatgcaaggaccctactgtgcactctgctgagtgttctggctctctggtatcaggtcactgggcctactctacttttggtgtcattctggccctgtgaagaaactatgaggagaatctggtcgatgcattttgtagttaacaccgcaaaggacatgagaaacttagccagagagctattagagtggcgatcagtgacgctgctgctctacccagtctgtcttgtgtgctttaagatggaagacacctaatgctgacttagccttccctaaagtgaacagaccactcttctaaggtttctgcttgttgtcaggaagtataagcaaagaatgacaagcagaacaatggacatttgttaagtgattggcttgcatacgttggctccttcaatgctaacagcaacgagtaggtgccattattacagccatgttacagatgaacggtgggtactattattaagtccatgttacaggtgagggcgtgaagcttatcaaggagttcattggtcatttcttgaccaggacacaagctcctaatgtttctctcttttttaaatctgagttttccaacactttttgatttaagaattgatctggaaagcccttcattcacagttgttttctggctactgtcagtaaaaaggataggctcaaaggaaatctgttgtgtttagaatggtggaggtatgagagatttcttttttatctttaaaagcttcattacttgttttactggtgttagttattgactctttttcctttatagtaacagaattatttctgtatgaaaggttatttaaaaagtcacattctaatggcaatcaattaattgaccaacaaatacagtaaaattgcaaaacaaaaccttgcaatgttcttaaatacatttggacactcaaaacaagataaaatcttacagataatgtgaatacattattagttatttcacattagaaaggaagaatgttggaaaaaaacatcatatttggtttaaacattgctttccacacacacgtttcagaggctgtgacattttcaggatcatagattctttggctgtttttccccttttaagtggggatgatttattggctaagtttccacagtaactcccagcacttgtagaactgtttagcaaatctgcattattttgcatttccactaaggtcacggttttcatagattcaaacagcaaggaattttaaaatttctccctctactaaagtttactggctattgtactcattatcttagcattcttattagtttcttttgagaaagtacacctggtaaagtcgagtaactaaaaagggtatactattcaaacgcaatgttattcaagcattggaatcctactcaaataataaaagaaaagaaaactgaaaatagagtgaacaaggttattatgttaggcagagaaaaaaaacagtattgtggaaaacataagtatgtgtaggatacacatgagacctcaaacagatgcatctttgtggaaatgtaaataatttattatagcagataaaactgggaaggagcttctgctaattaacatacacagtcattttccctgtgtagagaagtccaaaaactgtttccatttgcaggcatgtggtcattagactaatgggcactgcctttggacaggatttacttataccccagctggctcaaaaaagtaatcattctctaattaagaggcttcctcatgtgttttctattgtcatttctagagttccactatatctagcttggtagtacaaaagtggtatgctatttaattatcagccagtagtggggctgagagataccctgagtttcatcatgcagtcatttgtttctattgatggtagaggataggagggtaggtatacaagcatatacatgaaagaaactttcttttcccactcagttggaataaattataacatgtctggacaaatatgtgcgtgactattttcaggactgattggaggtcataatggattttcgaaagtaaaactcaaatagagaataagcttgattattctactaaccctctgtttttatgtttttcacttagattttaaagggttgagtttttaaagggctttagtaattttttaagagacgaattcaagaacaggggaaatggccactcctaaatattgcataaaacctggttgacaccacatgaggtctggaaggatatatttcccattattaaacctagctgtccctcatataagaatgggttacttgcattattttttacttttccattcttgatcaatattttcaaatgtttctggaaatgttttccagcactgttagagggtaacacattttctctactcctgagttcatgaggaaggattttatttttcttctcggtttttccctatgcctttgattaccacagttgggaaaaataattttaggcatgttctgttcagttccatgcttcttcctattgggagagcttttataaggaagcacagggccctttgctctttcaagggctctaattcatgggtgccccttgcccagggcccatcacttgtgtgcatggagttaggcttgcctaacccaggggtccagtaagcaggttcgtgtggctctcaccactaagtcatgttgtccaaattggtctttgtgcattcaggtgtttttgaaaaaccttgttcagtattctgcaaaaacttacactattccaaatctacccagctctgtaacgagagaactggtaaaaaaaaaaaaaaaaaaaaaaaaaaaaaaaaaaaaaaaaaaaaaaaaaaaaaaaaaaaaaaattctcagaaaaatattatcattgaaaggcatttaatttttaataaataaatataataagaacaggtctttagttaaaaattaaaaggataatgttgcttgatagatgggagtccaggaaagaattgtggttaggagacatgagtaaaatgcacaaatgtcaggtagacgagtacaattaacacttgccaaacagagcttgtggcataatgcaccccaagaaagaatagtctgaacaaactgtacttggttcctctacagattgttcccttcacctatttgtatactttgcatgaaactactgttacttgctgatataaaacattaatatgctaggaaaaaaaatcacaaatgaaggaagcgatgtcgagtttcctttatactgacatatttcccatattccaatatgtgtaagattttccacattactgaaatggaaaacatagcagaacagacaaaatcaaggatgataattgtttattcatctacactttccatcttttttaaatattcaaattgtttagaactccataaggagtgctattggggggtaggggtcttcagaaacgccgttgctcatataaacataataaagtgggaacatgattaaaatacttagatttctgattgtaatgaatataataaagaaaaactagcttaaataaataatgccagagggtatcaatggctggacaagataagagtttcattagcaaaaccacaaggcactagaccagaaagtttccaggtgaaaggacattaaaaaggttccattggactaatgaaattggaatacactaacaaacatgtcagtgtggacaagtaaggttctgctcaaaatctgtaaacttatcaagaaagtatctgctagaattctgaatgctgaaactgaaaaaaagtgtgctttgggcaaacaaagaggaatgttttgcattcaagaagtgtatgttttatttttataagatttggtagaaactgaagatatgaatatgtttaagaaatatacagttgattatcaaagggcatgttgtgatgatatttcacacacctgggttgatgctccgcaagatatatctattcatgtcatagtgctgtgtgatcaccttaatgcaaaatcccagagcagaggctcttgtgaactgcactgagaagtgcccactctaataatgaaatattgtggaccttttctgatactcagaaaagtgggttaaccaatgtaacatttcaaatttaaattttcttccatgattttctcggatatttttggccctgttatcaaaatatgttcatattagataccaagcgctttgtttaggccttcaggttcctcattcacactcaatgtgggaagatgcttacattaatttttgtttctaaaatggaaatattttaaaatctataccttaagatgggaaggcctgctagtaaaattactcttaatgtatatgtgtgaatcaaataccaatatcactaatggtttgaaaaatcactgcccaggagtagcagtaactgcaggacagtcaggagatgttccagtctctccctgaaagcagacatgtgtcctttggcaaatggtttgataactggggacttggcttcttcactggtgagagcggggagggagagggcttaagtggcccataaaactaaaatttctaagattccttctagatttgattcccttccaaagtatgactaggggtaccctaagggaagacaggacactttactagatgaattcagctgggatcctacgtgagacgtctttaattggttatattaatagctaatggcaaacaaaaggcaaggcagagaaaaggatggagcaattattgcatgctgagaccattttggggtaggcaagttgccacaagagcctatggttggaattttattttattttattttttacaaacaaaacaattcatttaaaagcaacttaaaacacaaccagggtgattttcctaacagctctttctggtatttcaatatcttgctatattcaaagctggagataatcatgcaaaccagccagccttttcacttcctggaagccctagttcagattattttactcttagggaagtgacctctcttcccctattgacctgggaaggggcagaaaaatcccagtagagtgaactgaaggtttgatacaagaagttgctcaacctggacttgcctagaacagcagccttttattctgattgaatctgtggaaaataagacccagaggaactcagactagtatagcttgtcttcttttatctattactgtttggaaaataaaattaatctgtagcagaagaaaaataaaggtgacaaacatttgctctaggtacctagggatcaaagtaactgagccttcatgtctttttttccactaatttaatacatccattaattttataagtatggatacaagagaaatcatttttttgttggtttttttaaatggtagacttatttgctacatcagctataattttttccacaccccttttttaacatcaaaaaaatgtaaaaacctttgcttcaatgtaaagtatgttgaactgtttccaatgatgaatatcatctgccaatctaataaatgtgagtaaggtgaaaacggaataaatagaatgtgggggcgggaaacaacccttgaaacggtaatcagcaagtaaagctgaattcctatgccatagtgtcccctgctggtcgattacggaagtagtagctttcggagagcaagtcaaacctcttggttaggccatatcatgttttgaacaaaaaaggcacaaaaacgaaaggaatgtgtgcatattgttttttgtctatttctttttacatagtcatcattggcagtgggacgaatgggggaaggattgttttatgcgtgaagaatcccagagcccattagaactaggcttagctcagccacttctccagtgatacgtgatctggcactcacagatctttctttaagcctcaactcctccctgtaaattgcaattagtaataataataaatgatagatttactgcagagagctgttacaaaaacataagaagagaaggaggaggaggcggaaattacacacagtaaagtgtacttaaaatgatatagcgctttccaaaacaaatattaatgtaagggtgcggattgggggagacacttccattaacaattaaactaacttcccttataatcatcaaaaggtaatccaggctgggcaccccaggcatggttgctgagctatcagactttcaaattcctacaacatcacctggtttccaaggacttacttgggtacctttgaacaatgtatgttgctcagataatttatattacacagaatttactatatacttagagaggtctctactggttggtaaacagaggtgatggggtaaaggagattaaggtgctccttgtttgcttgataatcattaatgattgagtctccatcctgttgctagttgtctgaccagcagcatctgcatcacctgggagcttattagaaataaggaatcttagatttcatcccaaacctactaaatcagaatctgcatttaaaaattatcccaggtaattcttacatatgttcaggtttaagaaactccactctttcacatttgggctataagctttctctggcaatacatcagttgttatctagtacatatgtacagaatagtatttttgacttgaccttattttaaaactacttggagaaattaaattagaaggaaaaactatggctaaggataattaatttttatgagcctcaaaagagacgataataagatgactttcctaaatgtaacttagtattatgctactttaaaatttttacagctttgtaatactaattttaaggtaatctcatgtatttgtattaatatacacattttatatttgcccttagtatctgtgttgataagaattttaaaatgcagattatttcattagaagagattttagaaaatagactcaagtctaagcagacgtttgaaaaatctaagagggccgtagcttccattaaaaataccatttacccaatcttttgtcagttaatgccctctgaacataagacaatgttctgagttgttggaagtggactgctatactagcaacacctatgatcacagtttctctatagatacaattttaaaataaaccaaacttggaaaatgagtggatgggtattagaaagaaaattcattctttttcacttactccctaccccctaccacttaccctaagctccacctcacaccctctgttgtgtcttcttcctttaggaatattttgtttagtttttttttgtttgttttgttttgttgttgttgttgttgttgttgtttttggtcatagctatgctctatttaataggtgaaaagactttaatgccagtgcttcacccaggatagtttctttctaactggtccttgctataaaagtatccattctcctcctattatttagtgtcctggctataggtgaaggaagtcatctgattcaaccagtgcacactgaggtgtgtgaactctgaacattcttctttaacctccctagtggaaacccactgagtttttaggaaagacactcacacaactcagtgaaaagcttcttagcagaacttcatacaatttaagacacaaagagttttagggttgaagtgggagatatttcaggacccaggtacctttctgggtccattaagcccctccaatcttctttagcctattttctacctaaactataggctctagctagctacacaggtaatatccttgtagaagggtaacaattgtgagaaaatatggatttcagagtttgtctgatttcctttactgaacactcctttgaaagtattgaaaagtcatatgtttccaatcactaaagttggacattaaggatcaggaaaaaggcctggagggggatctttgcagtataagagttttgactccctgctctagtggtgagagacctttcagtcagagagaaaggatcttgacttgagagagtaacagggtttccaatctgttcctttcattgaacagagttcaaaagaggctcaagggtgcacctctcttaggctctttatattgacacactcttctcttgccaaaagcttggtttgcagaacaaatcaaaaacacacccttgacaaacgttctggtctagaataatcacctcttccccaacttactatgccaaagaggggagcttaaaaatgacaaggtgtgtgtgatattgtctatctctgcattcttcataaatcttcaaagtcaatatatctggactgaactaaggatatatgatgtttctcatgctttcatttaaagtaagatcttgaggatctttccacttgcagattgatatgcatcacagaaaagtttccttgttgatgttcaatgaagtcgcaggctcaacacatgagcctaccaaacacggcaaataaaaatttgttcaagattggaattaagggcaaaatatcaaataaaatgctattgcaaacaatggtgtctcttcaaatgctaggtttggcatagaaaccaacaatctccaagaggtggaaagaaaatgaagatctcttaagggcaatgcaaacttccagagacattaggatttgcttagcatatagaaaacaatgaaaataaagaaaataaaacaaaacttctttctattgtgtcacagtaatccacctgttggtagcacccaatttggggactgaaataatggtgattttcaacagagaaaattgtacatttcctttatgcatcctttcttcactatgtttctgactttttcttctacctcaacatggtacagtgggaagcaaacaaaattgggaatcagaagacttattttgctcccaggtttattactcactcacgtgactcaaacacagtgctttaatttcctgaggaattaattatatttgtatgaaagaagtattgcactctatataaataataattacaggaaaaataataatagctaattcttaatgagtatttcttattctccagtcatttttgaaggtgatttacaattgttaattcattgaaattctcacaaaactctgcaacgctagataatattattatcattgttttatagatgaggaaattcagccacagattggtaaatcatttgtccaagatcatgcagctgataaatagtgaaatcaagattaagtttaggtagttgagctccagagcttacagtttttcatgttaattctcctcctctgatacattttcaatcccctattttgatgccatatcatgcttttccaatgttttctgctttctataaaatgttgatacctctaggaataagtctttaaataatggtttcacacctattgggagaagacatgatgggaaaaccaccataaaacaagatggaacttttaagaggagacacagtcataaatctgttctaataaataaaggggaaaaaaaagaataaaaagttaaccccttaaagaaaaacatacttttaaagtctgtctggatcttttgtgaagagcaaaggaaatgctgaataaaaaaggattttgattgtcctttccaaaatattgtcccttacctcttggacattggtgacaccacccacactccacccacctttaatgacctctactttctagtaaaaaactttatctttgcataaactttgttgttttgactctgcaatcaggaagatacttcatagctatatctagccaggtgtaggtaggatctgagtggaaagacagaaaaggaagttatattcattataaattaatgacatgccaggtattaggcatgtccacatccataattaataacattgggttaagcatttccatttaatacagagagagacagacagagtttgcacagtatctttcctttggttcttatctaatgactgactctcttccatgtacctttaaaaccactaaaataaatggtctacttgggaggttgatatactagccaagctataggtctaaacttcaaatgcaatttaatctatgcagcattcctttttcatagtgaatctttaaagctcaattttttgcattgattgatcatcctgggaaacagaaaaacctcaactcacagcttcaagaacttgaaaagccctaatccagtgcctatatccatcacctctgaggacaacaggaaaattgaaaaggaagaaatttcctacagactcatgataaacttattgatagtagtaatgatatacattttttaaaaaattatcaaattgtgtattttttaaattattaaactcccatggcctcaatattctactctgccaaatgatgggaaaatttaaattgtttctacaatttcccacatctctataacattaaaagatcaacttcttaaaacatatgtaacattttctttccttgccccaagatgcttttaaaggttttataaactacccttctttggacatttttgtcatcaatttgctacttttctgttcaaaatgaataacagcttcccataggcaatgatactattatcctctctgcatatgtaaactacctcgccttcaggacacaaaattcagtcccaaatcactgtcttcagcctcattgatattgtccctctcctaaagactcctatggcttgaatatgtgtcccctccaaaactcacgttgaaattttatccccaatatggcaatattgagtagtggggcttttaagaggtgattgggtcatgagggctgtcccctcatggatgtgttaatccatctgtggattaatgggtcatcatgggagtgggggtggtagctgtataaaaagaggaagagagacctgagctagcacacccagccctctcatcatgtgatgccctgcaccacctcacctcaggactctgtagagagacctccgcagcaaaaaggccctcaccagatatggttccttgaccttggaattctcagcctccacaacggtaagaaatatattccatttctttataaattacccagtttcaagtattctgttataagtaacagaaaaaggaatatgggaaagaccacagcctttattctctgtacatggcttgggcttcatcgtcttctcactcatactattttaacatctgttgtatgtttgtttttcctatccaattaaactaaatgttaaataatgacaatgcactcaataaatacttgttgtccttccaatatttattcagtaaatgttttcagtgtatagtatctatatgcccatcttggaaatctaagaataaataagatataagcccagccctccaagatcttaccatctggaatggtaaggtctcacaagaatggcaatgtaaattcagtgaaatatttccaagggctactgtgaagaatgcaaatctgagtctacaatagattaacatgagaatttccaagtagtaatgagagtctggttaagtttattgcctggcacaagatcacactaataaagaatatttattgagcacttaccatgtccacatttagttctcactacaactctaggcagtgtttctatcttcattttgccagtgagggaattttggctttggagaccagtgttttcccaaggctgcatgatgtagctgagatagccagggcttggtggaacagtctggctttcagtcagctgtaaccactctgcactacttcctcttgcttacttggtgcttttaaaatatttgttgaaagaatgacatgatgtagcatgcatcaacagtgaaaaatatgctctgcaatagactccaaatttcgaggtccccctaatttggctgtaacattgattgtgtgtatgtgtgtgtgtatgtctgtgtgtgcgtctgtgtctgttttagaaatgaatttacattctacacctgacttccatttgcccctctgcattccctattgccacagctgaagagtagaaatgctttatggctctaactgggagcagaaatcactgcaagtcaagagttgggtgaatcaatctcaatctctctctctctctctctctctctctctctctctctcatatttatatgctctaaatctgactgcaccttttcagaacatcatgcatagtatgaggggactaaattaaaacatctgacacaaacattgagagcaggaaaaaaaattgacatgtggtaactttttggagtggcattctggttgatcctttttcaaggggaggggagggttgtttacagatgagcccaagcttgatgcatgctgcagccaagaggcagctctcccctttgatttttcctctatataatctccatgtggtccccaaatgcttaaccctctctgccaaatgctgtaaaatctgtcttttgatttcacagatggaaaagacttattagctcatgaagctcacctccttaggagacaaggaactcatcaaataccatttaccccacccttcgagtttgaagtctttatcagtttcctggccaaaactgttcaacctcctttactcatatgacatcctaagtataaagaaaacaaaacaaaacaaaaatccatctttttgtttggcttctagtggtcttgggactttcttccaaagtgtttctcttgctgtgtttttaggcagtgccctaggcaaagagaaaatgaccatttgcatctcttggttataagtaggcttgtcattctcaaaacaacaacaataaagagacatacttaagcaccctcttttgcattgggacagcatcacctggaccagtttaaacctttcaaacagtacataattatactcaagatgaggattttaaagaacactcgacttggaaaacctactttttgagttaagccctgttaccaccaaatcatttggttttccaaagtttagtttcccagatgatgaaatttcaagttcactacaatagttacatgtataagaatgtaaggtgctgtgtcaacataaacacatgatttgattatctattagaatttagtgcaacctgatagatatgattaggcaattctttataagtggacacatcttttgtaactgattttattatactcttcagttaaaaaataatcatcgttccttcattagttacaggacagagttcaaagctctcggtattattttcaagccttccctaaatctggctttaaatgtctctctgatctcatgttgacattccctacgtgaaccctttactcctgccacattgacctttttgtcctgtgtccttcccatcagtgcctgatctgacatgccccttctttctatccctcctgctcccctacatacaagcaaggatgtagaaactcgacaatcctattctccaatataaccagcaatttttaagcccttcaccaggatagagtgaagaaaaaaaaagagtacctctaaatttgtctcttttttgccaacacttaatacaatttcaaggtctggctggaatttacttcttctctaaagcttgcactgctatcagacctgtgatgctctcctctcctgaattcctattgtttttgttttctaaaacacacatgtgatacttaacatatcctaccacctatgatgagctacttttgtacctatctgcctctcagaagtatgcaggatgtcaactgcacatgtgcaatgcatgttctcatatgtgtacactcttgttgtatgttgtatattcttaactaagctcctggagcaaagaactattcacacactcattctcccaaagaccagccccatggatagtgtgtaatcagtaaaatgaatgaatgaatgaatgaacgaaagtaaactaagatgaaattttaactgctgacctttgctaacactcccatgctaactcacaaatatttcagaaaaaaaaagtataaaaaagacataatgatgagaaaagcattctaggcaggcctattgatcttgccaaaaggagatgcagagtatagatggcacagactatgaagctgctgagatgtgcctcacccactttgaagagagaccagggagcacagtacttgcattatcattccactgttggtctctgaatcaaaagagaaggaggcaagttcctagcttaaataaattatttagaatattgatttaactgcctgaactgtgttaagttatatctgaactaaaagacaaacatttgcgtgtttcctttaatggaatctgtgaattcaaacatatatttgggtttttaaaaataatctccctctccctctccccctccccgtccctctccctctcctctttgcatggtctccctctgatgccgagcggaggctggactgtactgcaacctccctgcctgattctcctgcctcagcctgcccagtgcctgggattgcaggcgcgcgcctccacgcctgactggttttcatattttttggtggagacggggtttcgccgtgttggccgggctggtctccagctcctgatggcgagtgatctgccagccttggcctcccgaggtgccgggattgcagacagagtctcgctcactcagtgctcaatgttgcccaggctggagtgcagtggcgtgatctcggctcgctacaacctccacctcccagccgcctgccttggcctcccaaagtgccgagattgcagcctctgcccggccaccaccccgtctaggaagtgaggagcgtctctgcccggccgcccatcgtctgggatgtggggagtgcctctgccccaccgccctgtctgagatgtgaagagcgcctctgcccggctgcgaccccgtctgggaactgaggagtgtctctgccccaccgccaccccttctgggaggtgaggagcgtctctgaccggccgccccgtctgagaagtgaggagcccctccgcccggcagccgccctgtctgggaggtgggggggcagcccccgcccagccgccaccctgtctgggaggtggggggcgcctctgcccggccgccccatctgggaagtgaggagcccctctgcccggctgccaccccgtcccggaggtgtacccaacagctcattgagaacgggccatgatgacgatggtggttttgtcagatagaaaagggggaaatgtggggaaaagaaagagagatcagattgttactgtgtctgtgtagaaagaagtagacataggagactccattttgttctgtactaagaaaaattcttctgccttgggatgctgttgatctataaccttacccccaaccccctgctctctgaaacatgtgctgtgtccactcagggttaaatggatgaagggcggtgcaagatgtgctttgttaaacagatgcttgaaggcagcatactcattaagtcatcaccactccctaatctcaagtacccagggacacaaacactgcagaaggcggcagggccctctgcctaggaaaaccagagacctttgttcacatgtttatctgctgaccttccctccactattgtcctatgaccctgccaaatccccctctccgagaaacacccaagaatgatcaataaatactaaaaaaataaataaaaaataaaaaaaataataaataataaaaataatcttaaagagacataattctctcccttttaaaatacatattcataagtatgtatatttataaagggttatataccagggcaaaagttactgataatgattctgcaagaactcttagtttattgccttcatttttaatttataaatgaaataatctagttcttaggttggctaatacaataatgttttgcttttttttcactctttataaaattcattttacttattttagatacatgtcataaaatcctcacttgcatttgcttatttttgtggtaagctaagaatttaatcttactgaaataattataaaaaattaaagcaatcatacaatataataaaagaacatagtctgatttttgtaaaataacactcagggtatgcagatatatgacagacataccttttttccacacatctacaatgatacaatgatcttattttcaacaaaggcaccaaaaacatatcctggggaaaagacaatctcttcaagaaatggtgctgggaatacaggatccatatgcagaagaacgaagctagaccccaatctttctccatatgtgaaaatcaaaccaaaatggattaaagtcttaaatctaagacctcaaactatgaaattactacaagaaaacactggggaaaatctccaggacatttttttgggcaaaactttcatgaggaatacactacaagcacagacaaccaaagcaaaaatgggcaaatggaatcacatcacgttaaaaagcttctgcacagaaaaggaaacaatcaacaaagtgaagagaccacccacagaatgggagaaactatttgcaaaccctctatctaacaaggaattcataacaagaatacataaggagatataacaactttacagaaaataatctaatgatccaatcaaaaaatgggcaaaagacttgaatagacatttctcaaaagaagacatacaaatggcaaacaggcatatgaaaaagtgttcaatatcacagatcatcggagaaatgcctgaatagacatttctcaaaagaagacatacaaatggcaaacaggtatatgaaaaagtgctcaatatcacagatcatcggagaaatgggagaaatgccaatcaaaactacaatgagatatcatctcactccatttaaaatggcttataaccaaaagacaggcaataacaaatgcctgtgaggatgtggagaaaagggaacccttgtacacagttggtgggaatgtaaattagtacaaccactatagagaacagtttggaggttcctcaaaaactaaagattgagctaccataagatctagcaatcccaatactgagtatataccccaaagaaaggaaatcagtatatcaaagagacatctgcactcctatgtttgttgcagcactctttacaataactaagatttgggagccacctaagttttcattaacagattaatgcataaaggaaatgtgttacatatacataatggactactgttcagacataaaaaaatgagattcagtcatttgcaacaacacagatggaactgggcattattatgttaagtgaaatagccatgcacagaaagacaaatatcacatgttctcacttatttgtgggatctgaaaatcaaaacaattgaactcatggacatagagagtagaagaatggttaccagaggctgggaagggtagtggggtggggggtgggaagaccgtgtgcaggggaggtaaggatgattaatgggtactaaaaatagaaagaatgaataagaactactgtttgatatcacaacagggttactatattcaataatagctgcattgtacattttaaaataacttaaaagagtgtaactggattgtttgtagctcaaaggataaatgctaggggggatggataccccattctttgtgatgtgtgtatttcacattgcatatctttacgccataaatatatacacctgctatgtagtccataaataccccataaatatatacctactatatactgacaaaaaaattataaaaacataccttttttgggggaatatttttcgaaatataccccataaatatactccataaatatatatacctactatatacacacaaaaatttgtataaacatacctttttttcttttgggaatattttttgaaagatgtttttttaataaaaaacaaacaagatataaaatacatgaaaatctttgagtattgtctatctttctttgggtaaaagtcttaaggttttggacactactatccttcttaattcatactaaaaatcataatcactcctaaagtgtagtaagtccctcggaaaattattaaatgataagcttaaaagaaaaatttaatgtatatactataaccatttaaaaaggagagtgttttgaggttgtataacctttaaaagtacattttgaatttctatattaattttaaagtgcatcaattttgtcatatgaacgttcgtaataccaaatatatcaataaactgtaaaaattgagaagggagactatgttgaacttaagaaaatttcatttgaaacctattaatttcagaaacaaaccatacatatataacagaaataatttacaattaaaatttttactgaagctctttcaatggacacccttcatctttcccattactctcttgtcacttcataactatgacatggatcaggcacattaaacatagttctacatgaaggagtaaagacaatgacaaaaactgtggaatggtacataggaaggacttcatagaagcagggagtaggcaatgagttttagtgcttttaaaattgaaaaaagaagataatcattactaactgaaggtctttctataaaataaaaataacaaggtagttcacattaaatacattaaattacagttaaagttatttttaactccacagattaatgcactttccctttcacagaactcattttctattaactttagcaaccagacaccagaggttgcagtgtaaggtgtatttttttatggctcaaatataatttaatcattgtattttctcttcactagattgacaaagtgcactatgaattggtggaaatgcgctgtctcatcatgtgatgatcagaagctgtgataaagatatcatttgctccaacatttctagcacacgctgcatagagtctgcaaatgttctgatgaagcatggataatgatttgaatttacacttcagatccacagcatattaggctatggtctcactggaggcatgtgaaatattagccatagagatgtcttaaccaccatttacatttgttttaacataaaatcagctagggtataaaaatgcacaagtctctctaactgtaaataaccacacatcatcataaatattgagtccaggaccaataccttatcactcgtagttacatctttttgcattaattcaagaagatcttgtgacatagtctctcacaatgtgatatgctaaattacattaaaaaaaaacagaaaaaaatagacaaactctgtagaggcttgtagtttcatcactgtgaatcactttcaaattctatattcctatttttatggccaactgttagtagttattcaacaacatacaaaaaaaaaaaaaaaaaagcttggactagtaccattgatttgttcattcaaaaagaatttgtttagtacctcctatatggtagccctatcctagccactgggaataccatggtgagcaatacagtcaacagttccttccctcaaagagcttatacttcagtggagacagatgggcaataaacagaataactaagctatataataagatcaattgtattctgtactatgggggaaaacagagcaataaagagagagaattggaagtggtggaagtgattgtaaatgttaatagggtaagaaaggcctcactgagcaaataaaatataccaagaaaggagacaggaggaaggcaggaaagtaaaaggttgggagaacaaaatgcgcaaagaaagctgagaaacactaatgtgactgctggcctctgtacctaccttaagctttgtgttccctctaccagtcccaggtgacctccccaaatatccctttggtcttatgctctatttcactcaccataaaattaataatttctatttccttctattttaggagacatatgaaaataatatattatacattttcactattgtattagtctgttctcacactcctataaagaaatgcccaagactgggtaatttataaaggaagaggtttaattgactcacagatctgcatggctgggaaggcctcaggaaatttataatcaggcagaaggggaagcaaacatgtccttcttcacatgatggcaggaaggagaagtcccaagcaaagagggaaaagccccttataaaaccatcagatcgtgtgagaactcactcactatcagtggcatgggggttaccacccccattattcaattacctcccaccaggtcccttccacgacccttgaggattacaagaactacaattaaagatgagatttcggtggggacacagccaaaccatgtaaactattgtttaggatatgtgtatacctttttcagaaagttatattttgcattagtgcagtaaatgaaactgcaatatttacacagattcattttgaaatcttaatcaaaaaacagtaacggtttcctttttacagttacataaaaaatgaagaagggacccacccattaaacctaccttgaatgaggaaagagattgagactgaatttcatttctgcctccagtcatgttttataaaagcggtcaaaccagttttccttacaagcagatgtccagttgtatctgtatctgcctgcctcctcaacccatcctccacaagattgagaaaaggaagacagtgtgctcttgatctggatacacatttcaagccaaagttttataaagaggaagttcaattcaatgtagaaatatctgaatgctgtgtactattttattgggtacagaataaaaggggcagcagagtaactttttgacttctcactgcatcttttgttttcctaaagcttctgcttcactacgaatgaagaagactaaaatttctctgaagagaaggaagccatccatgatttttgacaatgttaaaaccctgatattctgcttggtcctaggtattctgctgtatccctgacattctgcttggtagtagggatttgcactgtgcttggtccagaagacaaattccaagctcctacagagtctgatggctttacaaataacctagctatcacaattctaaataagtgtgaaaaccctgttaaagcacataggaaggggacataacttgtttggtggggagggagaaggcaaggctttcttgaggcagtaacatttgaattgaggcctggaaaaagagtaaaaattaaagaaacaaagaagaaatgtactgaaaaagcaacaaagtccaaaagaacgcacatccaagaaaccgaaaagtgcaggatcacaaagagaagtataaaatgtaaagaaggaataagggatagatggggctgcacagataagaaggctaaaatatcacatgtggattaagaaggaccatcctgaaggcaaggtggaggaacggagtactgagaagttttaagcagaaaaataaaatgaccaaatgtgcattttagaaagattactagttcttccagaggtctaaccgagaggtcaccatgatgatgacctgaaccagggtagaagctggaggaaaaataaaatcaaaaggattttatttcctttgtacttgagagttatttaggagatgaaacaagtgaccgatggaatgtagggaggggtttccttcttggttcactgagcacgtgcctcttcttatatctctaaagcaagcaggaatctccactgagtcctgaacaggctcaaaaagtttcaccaagaatgaatgtgcaactatcccaacaagtttcaccaagtataaatgtggttcagactcattcctcaacacatggtgtaccctccttgcagcctcccccaacacacacagctgttttattttagatgctgcaaatcataaatgtgtattacagatctaacaattgtaaaatctccaaataaagttatttctttgagtgactggaacggagaaagggagcggtgctttgtatttggcaggaacttagattagtgtcttttcagaaagcccagtacattttgattagctcaatcatcattcaacaattattctctctctgattttaaaattttcattaaaagcaaatttttaaaaaggcatacccttgtacaggagaactcccttggtattgagcaaattcatccagggatcaagggaaatacaaaatattttcacaccattatcaatgtttatgctgtagcagaggaatcagtctcaaacacaggcaaaatatgcatatatttttaaataccttagatgctatagtaataaaaatattaaaatatatatggcaaatccattaatctactctgagtatgtctattaacatgtttaaaggcataagtggtttatcatatttttatcatatttaagttacaaaaatcttttttattttaagctttttatcatttaaatcatatttttattgtagttaagttacaaaaatctttgactctcctttgaatattttcaaatcaattccataagtgaagacaaaatacacaattgaggaaggggccatgatttgccccaaaattgtcatcaaatgaatgaactcaatgacttctgaatcacacttttaaatcagatgttcccatttgatctgtcaatttctccaggtttgatacataggtgtaaaatcatcacactcttaaggcaatgaactgcaggcttaaataaatagtatatctgaaagagattaaggcaatcgtatctttcagaagaatcatatctttcagaagacatacttggtaatgagttttggactgcaagtatcagttcttagacacagcatgtgacagtttggttgcttggctaaagtttcacagcgaataattcatctctgcatcagctggaccctgacctgcaatctcattagattcattctagcccaatattaaaagtatttcttgctaataatgcaaatgccattatcatccaagtaataactagtgtctggtagtatactgatgaaattttgggtattcttttgcatttttgtccaattttcattatttctcagtgggaaagaaaaaagaaaggaagggaggcaataaggaagaaaatgagaaggaaggaaaaaagaaacggagataaagaaagtaggcaggtgggtgtatcttacaaatttgcatacatacaatagtttgagtaaattggaaatacttaaactttatcctttgtaatgtaaaaacattaaaacaaaaattctccaccatgaaaacagaaaatatatatttgtatctcctcccattatatgcttttatgagagatggttagtgaattttacacttaaatagacacacttctttttgaaacctcagttttacttggtaccaataacactgaaataatcctccactgtatcccagctaatgcttctgcatcccaccaaatacatctgaatgcatggctaaaacagaacacgtgatctggccagccttacacgtgtaatgaaaatctaaattaaagagaatgagacagcagagataaagaggatttggggaaggaataaaagagactaaacatagcactgagaattctcctctttttacaaaaatgacagacttaagagagggcatggaacagattaagagaattaacatggagaggagagcagaggtataaaaggtatccaagaaaagtaaaacatacaaaggcaattcaaatcaaagtgagcactgcctatatacagacagaaagcgagtcctctatgaaaccatacttggcagaaagtactcattattaatagaaagtgaaatcattttgatatctacaccagcagtcattaaataggcccacagactacccctggttttgcaaataaagttctattgtaatacacacatacatacatgtacacacacacacacacatacacacacacacacacggcaaaaaccaagcaaacaaaaatcatgagtgacatttattggcaactaaagttatcattgatttttgctgctattagtggagtgtttgcattgccctaacactggccaatggagaaacaaatgtggatgagccagctgtccctatgatacttaacatcatcaattttgtgtttaacatttgaccatatgaggtatttcacttaaaagtaccttaaggatgaggttctagcattgtgtgataaagtacagctcatgaaatccacataattttctggttgttcgtaatttccttgttcatagactgatgaatcaaagaaaaggactggtaagaattctcaaccatataaccttggtctgtgttttgctgtggtaatcctattagggtaatcataatttaccacccaggaaaggacacatgatagtggaaggtgttaatattaataattaataccagtacaacaagaatacatttggattcctctaagtaaacagatgcatctggtcctggtcaccctagtcaaaatagacctgtgtgtgtgtgtgtgtgtgtgtgtgtgtgtgtgtgtgtgtgtgtgtgtgtgtgtgtttcacattgttctatccctctggcctaccatattcttattcatatatcttgcaatggacccctgttatttgctaggtgggagaggagacattaataatgcagaaatttttttttccgggtatttttcatgtcaaaggacttttacactaacgttatgatatgctgcatttctacaaagttcaatattgtgcttgttttaagaaaaggaattatttgtggttttccactttgcatgccaaaacagcgattttcaatttcaaaactgttgtatgcatcggtaaggatataatttacatctattctcccttcccccttcactttctaaatggagcgacattaaaatataaattcatgcaatattaggtaagtgggaaagtaaggcctttcttttgactattaagcaaagaatacatcttaggaacaccataaatcatgcttgtcaggatattcaaaagaatcattctgtatagttaccattctattatttagaaagcacagacatgaaacaatataattcagctgggctgcatgtatctgatttgcatatggctgtatctttttaatctgtgttttcacaagatgaatataattagcaagatttaatttatctttaaaaccactgaactatgttgattacctgcaggatgacatcacccatatgcactagtagatttggactcctaaacagagcaattcaatgtattttgtagctaaacaaagtgcatactgcaagttaaaaagtgataaactagtcatccatgcaagatgcataattcatcatgaagagatcagaactgttgttttatcctgttttcctatttttttctcctaaagaaaccacaaatgatttgggatagtcaatttacaagtctgtgaccattgattaaaaaaatattaaataaacccttcagtggaactgcatggatatattctctgtacttctcccatctgagcccttcatccacctttccttcatatacgctttcaggttaagaatttttcacataatgaattatctctgacctaacattctcaaaggagcttatttgtgctaggatgtttgactttaaaggaacgataacaagaaatatcatgttaaacttgtcagctataaaataaaaagtataatttctaatacaatgcattatttagtcatatccaactttttaaaaaattgtacaaattcaaatctgtggttctgggatgttagaggctctaattgcacacaatgtaacatgataatcaacataatttcctctaaaacaccagtttgtgtccccatgaattctaactatagcctagagtaaaaacaaagaaaaacattttaataaggacaatgtattaccactgggctgattattttcccagagaaagacaaccatgaaaataaataaaaataaaattgtttgcattagaactggcattattagatatattttactcattatggaaagaaatatctggacatcgaagaggaaaactcaaaccacaaacctcataatgaactgcttctcaactgaagttgccatttagtctgactgacagtattttatttctagggttggctttatgttggtctaatctagattttgtattgaatacacacagacatagcagaatatttcacaactcctcatcaatctagatcaattacttatctaagtgcagatgaagatttgattcgtgatgtgctatttctcagagaattgtctgcttaaccgtagcaaccagaaccacaaatataactggtaacacaacaaaaattgagagttaggtcagctcatagaagaaatatacaaggcagttacgtggataaatctttagacatcaaacacatgcaaaattttcccaggcttcctgaccactctcagttttatatgaaagtgcactttaacttgttgactgatgtcatactgattttcctcaaatatcacttttaacccaccacattccatggaaaacgttttgctggccaaataaaacccaaagccttgaattcaaatctcatcacagtctggcataaactaacattttcagtctactagctcacaattttccacattgaatccttgacaagtgagaattatttcctcattccctggtgaaacatattcctttcctgtctatctttacttaagccttctctcacctggaattttgtcttcccttctatcatcaaacctgtggttctttcatctgatttatctaactctcatagctagaagtaagcccttaaaaacagggatatatctgtatgccccagcatgaaaaacctatttgtgattgattgattggatcccctcctatccaaactcatttttaggttttattgtacacaccctaccttgcctgacttttcccagcaataagtgctggtttgatctgccaggttacccttcaatgctgtttggctttgtgtcctcaatgggccatcttattctatctttagcaaacacaaagaagtcaccttaagaagaaaaacgactagaaaagaaaaacgagagagcatcataccagttccattgccctagaaaagagataaggaagcgagatattaatttttttcataattaattaataaaaatctttattgatcccctacatatctactaggagctgaagatacagcagtgaataaggcagataacccacccaccaagagcttccattcctgtgttggaggttataatggtgatggagagacacatgataaagcatcagatagtatcattattcactgttattcaggaaaagaaagaaagaaatttgaaaggattgccagatgtcaggaaagtgcttactatagagatgatgtttaagcaaagatctaaatatgagagggagccagccagaccagcagctgggtaatcgctggtatctgccataggcaacagcaggtccaacagccatgaggtgagatctcctttgcccacttccagaactgaaaatttacagtggagaaagaacagcatacagataggctggagccagatcctgtgaggctgtgggccacaataagaagttcattgaaatgggccacagtgggaggttctgagcaagagagcaccatgattctttaccttacatgagaaagaagaagaaggaggcggaggaggaggaggagggggggaggaggaaggggaggaggaggagggggaggaggaagagggggaggaggaggagggaagaggaggagaaggagaagaagaagaagaagaggaggaggaagaaagtgaggaagaggaggacaggggaaggggagggggaggaagaagaaggaggaggaggagggggaggaggaggaggaggagggggaggaggaggaggaaataaattttgggagagaaacaagatagggatttaagaggagaaatgtttgcaaatcagagagacggtacctggacctagaacctctgacatttatgaggactgggagacactctgcttgtctcttggtaggctggttgagtgcaccggcttagagagagtgtaaatgacagggagaatatgggtctacctaacactggctctctaacaataaatgacaaagacctaggtaagccagctctgaaaatctgtgatactaaaaatgttttcttcatatgtaacagtatcaagcacaacttaatttaattaattatatgacttctattagcactttataaataccctgttctaggctaagctttgtaaagaattcaggaattcagcacccatatctaatgagtatcagtcctggatacctatttgtactaaaaaccaaaggcttctccttctttgctctgattctaattttctgaccttgtatacactggttacttacagattaataccagtaatatcagttatttcgtattgcataatatttttctgttaaaaaataagaagcatccctttctaccaattcactgtagttcttcattctacatttagtaacaatgagaaactgctcattgaagtaaagcttctcaactatttaaaaacaagagactggacctcagaataagaaaaattgtgtgcagtgaaacaggttgtaatttataccaccacttcaggccatattgtgcattttgccagaaaaataaaaaataccaaacttgatggtgagcatgcaactgactcctgaactcttttgtgataaagtattctttcaagatcctaagatgcaacactaaaacataattgcttgtattaattgtcaatagtagctcataacaactaggaaactaagactttatactggaacaagctctgttttgttgcctttcaatcaatgtcttccctggaagtacaagcctttatttaacctacacgtctggatatctgagaagtttcaccttatgacttgtttcaattataaacatccattacaaccagcaagcttcctgtcttacaactactctccagctgctagatttgtaacctgcaagttattgtttgtgttaatggcatcctagtttttatttttatttctgaaaagctatggaggcaggtagaggcagagatggaagaggtggaacagcatttggtattaaaggccaacatgagcccataattatgtacatcttgatctttgtaaattaagatcaagtatataatgttgaaccctaaatgctttctattctaggatttgttcaggttcattttcctttgttaaatgctctggttggctccatgttatatatttaacacctctttcttcttgtgagtttgatctaagggtttccaaagaagcatgatgcctttgagatgaagaggcatgtcgtcataggttacccccgacagggcccctgttgctgcctgccacaccttctcaccttttcaagaagcttcattctttcctacgggaccttgaacgtcacttcaccggtattcttcaaaaacagaaaatacaggctactaaagaggaggcacactgggcatgccaaattgtggacatccttatcatatcccaacctctgtgtgcatctatcagtgatacttgttacagagacattttaacatcctttcaaaaggtaactacttgtacctacagcttttgtgatacctgaaatcaaatgatattatttgaaagatatgagtcatgtgcttcaaggtaaactgaccttgcctttttgatcttctaaactatcatgtggaaacttgaaatttcacttttcttagtagagaagcttaaaagaccaactctaggataaagctgcaagcgttaaagcttaaagaaccgtgaatgccaccaattgtgtttcttagttgctgtaactgtaagagattgtataggtgaatgatctaattctcccaacaaaatcagtctagatgacttttattaattaaaacaattcttatcctagtatacctcctcagaggaggacaatctttttaagcttcatttagttgagaaacattctcctaaatttgatgtattttataaatgaattttttaatagcatgcgtactgcacaaattctacagcaacacagtgtattgtattttgttttctacattcacacctcccagtacatggtgacatgtatttgagagtggagagaaacttcagaagcatatctgagttcttccaggacaatttccacatctaatgtaccaattctttagaggtcagtcttgtaaaatcatctatttcattttccctgagggatgcagttatttttgttgcattcggcccggaaaaatttcactgcaaattcagtccctgacccatgccaaagaacagaatatagctacccaaaccttaagatgtttctatggtataatacatttcaaatgaggtccctttgtcatgccaccatcataattgacaaaatatacattctctctgctccacacagtatttctttaaattcacagcctttctttcaatatttgaacatttagaattgtgttgtacactgacagcacttaatgtacctgtaaggggaatgaaagagatatttggatgtattttcaaaatttgaagacaatatatttactgccaaatttgctatgtcttagtgctgccactctttactgtcagaggaatattgacattccagtgatgtctcacaaactaaaagggtggattccaaattacaagctatcttgtttaagatactaaatcactgacatcatctaaatctatttttgtgacgataaaaatactttaattataatccattgctctcagaaagttataggacgatatccaaatgagaagccatcagcttgtaaatacataaagttgtgcaagaataagttaaattactggctatctctttaggacaaattgtcaacatgtataattatacagtagtttaactggtgaggggaaggtatgcaacatatattctgccaaaaaaaaaaaaaaagcccataacattctgacaactcatccatatctctcgcctttgctgccatatctggaaatggcagaaatgcttacatttttggttctgctcatatatcagagtatgtgtgacccattaggttggtttctctagcagatttccctaactggaagtgtcatgtaaggagacatccacaaagtgtgtggtattggtgatgtgactgctatcttcctctttctctaacaagttgtattaatgcagcaaaaatcaactggaagggcatactcttgtccagaaaatttagaatgataaaaatatctaacctaaatcaatttggcaaagttgaggtgctacctgcccttgcttcagtcagtaattgaactttcctttggttctgttgacacaataacaagacctaaaagtaacttcttcgaatacatttttaaaaatttcatgtcttatccattcccattttctttatattttgtcttctgccatgtcctgagaaaaatgcctgactttagagagaatccttagatttaccacttgaaacttaaaagatcaagtctgaaaaatggatacaaagacaagtagcctttttgttggcgaacagaagaattagaaataggtagtctaaggtcagactcactttcattttcctcttctttataggcaatcttctgatgcttgcttttcctgaaagaactcaggcccaaattctttagggggattgtcaatcaagagaagcgaggataagatgaaaaataaaggcaaggcgaggctctgtggctcacatctgtaatcccagcactttgggaggctgaggagagagaatcacttgagtccaggagttcaagaccacctgggcaacacagcaagacccccgtctctacgaaaaaataaaacatttagctgggcatagtggcacacacctgtggtctcagctactctggaggctgaggtgggaagatcacctaagcccagaaggtcgaaacagctgtgagccatgattgtaccactgcactccagcctgggcgacagagcgaaaccctgtctcacacacaaaaaaggtaaattgtaagaacaaaatatggtacacattttcattgagagacacatttagaacttggtttttaatttaagaacttttgtaaatacatttaaattgttctattctgtaaactgtcttcagtcataaggtagttagatattcgtttcattgtatctttccaagaagacataccttatgattagaggcgggacggggaagtgggagagcaaggaaagagattagctttgctaactgtctaatctggatttgtgtctctgaataacatttattagctctgggcctttagaaaaacaacagataacgatagaccttgctttagcacatatatccctatgctaagaggtttacattaattttctcatttaatgtgcacaaaaatccaatgagaaaggtactctcatgattaaatccatttgaatagaagaggaaaaataactttgccaatgtcacacagcttctaagtaccatatttatatatttaggtctgtgaacacagtatattgcttgtctgaacaatatgaaactatgtataagtaaaaaaagcatgcgggtattaaataaaacctaggtctacattctttgaccattgtttttactcatgtattttcccatgaaagaacaacatttttgccatacacattttttggaaataattttaaaattccttattttatattacatttagaattaaaagtagtcataataatgggaataataatgagagcatttcacagctctcatcgactcctaacctgagaggttgttaaaagtatatagagtgtctctaaaatatggaaatcatctctttttttaggaaaaaaaaatacttttttttcttttcttttgagacggagtcctactctgtcaccaaggctggagtgcagtggtgcgatcttggctcactacaacctccacctcccaggttcaagcaattcttgtgcctcagcctcccgagtagctgaaattacaggcacatgccatcacgcctggctaattttggtatttttagtagggagggggtttcattatgttggccaggctggtcttgcactcctgacctcaagtgatccacccacctttgcctcccaaagtggtgggattacaggcataagccagtgcgccagccaataatattctcaaaattttaattttgaagaaaataaaaatagatccaagagaaatagatcaagagtaactcacacaaaatctttctaggaaaaataatatctttttttacaaaaaaatcctactgaagaacaaattatccataattttgtatgtattacctaatatttgaggcaattgagcatcagccttcaaaaaggaaccaccccagtttctgagatcatgagttgtgccccatcaatagaacttctattgtgggcataatggaataagacgagagaagcacggtgatcagatgaagggctatagaactaaaaagtgatcaaaatacctgctgcatttgctatcacttaagcactttaattatatatctattatgaaaaattgcattgatttacatattaatattctacatttcagcatgtgccctttatattcacataaaacagaatacactctgtcacacacatttaacctacctgactcagccattaaactaaaatttgagagtgggagaaaaaagaaacagaatgaatacagtactcccattgttctattcaatgccttggattttaaatccttaactgtcactcaattgaactctatttttgtcattttgcctatcagtcatgacggggagtttaacctagggtgagccatcagtttgtctccaaaccattttttaaaatggtcttatgttcctggggtagggacctatgtgcaaattttttatatcagtctgtaatttcactttaatctcaatgactcctgggcaggtagaaaaaaacagcaagccaatttgtgcagtataccaacactatccaatagaactttctgtgatgatggaaatgcttcttgtctgaccagtcccacacaatagtcattcgccacatgtgactagtgagcacttaaaatgtggcaggtgcaactatctggtttttaattttaattaatttaaatttaaatagtcacatgaagccacagtgatgtcttggtatagtttatgtacttgcagctacattatttaataacaagcacagccctgtaccaggccccaaatttctaggtgactgtgaaagacaaaatgctggaatagtaactgtctttctctataggcttgtgtgtgaattaccagtcttagttaatgtgtttctgggtttgtttcaggaatactgctgagaacatttcaacatctgttaaattacaccaatgactacaagtcagggtatctaattcctaataggaatccttactaccatttggacaccttttgattcttctcatttgaaactcttgcattggccacagctgctgttctaaattgcctccacattcaacatttttgtcctactcttcaccttcaagctcagaaaatacactaatgcctcatccacaaaggagcccaagttcatatgatactagttctgtgaatgcatacatcactgccaccatgcctcaacctctctctactcttccatattatactcttcttgtcaacaaagatgcccatgctttttaaaatctcatcctcatacccgtgacatcttattaacccctttctacctgatctgatctcttcttcaaacattatctctgtcttctttttgtatgtccaatctttgtctacccactggcttctccacttaacataagccagcaatttttcccagttccctccactaatcacacttaacactatcataattaccatggcttacctattcgtttcccttgacatcctaggtttttcctaaatgacttctttgaccagtgacctgacaatcacctaatccaagatactttaaaaactcccttggttctttctgtagctctttaattgctcattcttatttggtatgctccatcattccattgcctgagattgggcatttttcaagataagagaaaatcaattttcagcctacaggttaagcctgctgaatttttgtatggcacaaaggctaagaacagatttgtttttgtttatttttatttttatttttttaaatttaaaagtatttcacattaaaaaaccaaaagaatattaacatttgacatcatgtaaaagtattataaaatgaaaacataattgtccaggaagtgttattataacacagccatagtactcttttacctattgtccacggctgctttcacactacaatcacagagttgaatagctgcaacagaggctgtatgatctgcaaagcttaaaatatgtattatccagtcctttacacaaaaagtttgttgacttttgcacaagatggttctcaacttttttttttctttttaaaccttctccctcacttatcattgctgttcccagcactttcatatagtaaggcaagaactaacaattgttgaatcctataagaagtcaggcactatgccaggtgcttcacaagcatcactgtatgtaatcctcaccactaaataaggcaggcaatgctactgtacagatataaaatcaggttaaataacttaaataacttgccaaaagtattgctcgatgttagctagcaatttgcggagaagacttcctagttcatttcagggagtgaatacctatgctccacacccaggctcattttctaatccctggagctccacatcattcactgcattccaacccggtcacttcctcccctagaagggcttcttttcctttgaatttccctcgccattagtttaggtcagaaaataactacctcttacctggattaggacctgttattctttaatgcctttattctcttctgccttccatttaccctgcattttcttatcaactaatccctccaaagaaatactgtctaacccatctcacgcacgtatttacatctctgcaaggatcttgtaaaatgcttctcaatttgtgatcttgccactcctctagttaaaagccctccacagatgctagttgcctaaagaataacttctatacttctttcctgttacttaagtatatttataatctggtacaccctacaacaaataaagccagtctggattgctcattgttcctcttctttctgccacttggaattcctgtcccttcatttacatctgattacttgagacaggagagtttttatccttctctccctgaaccactttcctttcatgtcatttttttctaactgcctggcaggagaattttcagtatgcatatctaatctccataactctactgtaatctcctcaaaggcatgtactcatcttattctctttgtacaaaattcctgatagcatccaatacaattcaaggtagatttttttagttgttaaccaacagctatactctcattttcctttttgccagcagaggctccatttttgtttatacagtgaaggcttcccatccccgatttccgattccccatctccagtggcttggtcataatggacctaaaccagttaaggcaaataaatggctcattgacatggaaatgagtccctcagagaaagaatttcctccttaataaaaaatgatacatagaaggaaacacccttcattgccagaaacaagcttcaactatcttaaaacagtgaggaaaagcatagttatcacactcaagctattctatggaaagatgtaaagctccttggtatttgatgacttgttttagccactgagttagtcaatcccactgcagtcttatttctagacttctcattaagaagtaatagaaattcattactgttgaagctacatttaattgtgtccattattatttgcagagtcttctgattcacatgtcaataaacatttcttgaaatttaaatatatgagtgcatgtttaaaaatacacaaacttatattgcatgtatgttctgtactcagctatgccatgtgttattattatttttcattattacataaaatactatttggtactgtttttggaagatcttcagtggaagaaacgtttcttctatatattttctcagtataaaacacattacagttgtctaacattgataggtagctagcaggaggtaataatttttttttttttttctgatttcttcccagggagttatgggcagcgaaaacgtagtagaagtatgtatcactcagattattcaaaaatgaaagagaaacataaaagagagaaaggaaagaagaagggagtgagaaagggaaggatggaaggagttggggagggagggaaggtggaagggagggaaggaggggaggagaaagggagaggggaaaggaaagaaaggaatattttgtatgcaaatgataaataggttgcagaggtcagtagcctgatactgagacaacttcagaaataaaagcagatggtagagcttttgctttttttctctcttggccacaaaactcctgctaattgaagtagcaactgaacaagctgctctttcactcccctgacaatatttatgtttcacttaggttctgactttcacattaaacactgccacacctcctgcttactccttgcttccggtatctaagccatttttttttttttttttttttttttttttttgagacggagtcttgctctgttgcccaggctggagtgcaatggctggcgcatctccgctcactgcaagctccgcctcccgggttcgcgccactctccttcctcagcctcccaagtagctgggactagaggcgcccgccaccatgcccggctaattttttgtattttttgttgttgttgttgcttttttttggtagagacagggtttcaccgtgttggccaggatggtctcgatctcctgacctcgtgatccgcctacctcggcctcccacagtgctgggattacaggcgtgagccacctcgcccggccatcttttgctttttctatgggtggattcctctcttcacatgacttcatcttgaagagaaacaaatgaataaactaccactacctctcaaagtatctcccaagactgaataaggtttcctgaaagaaggacaatgagctactgtgagtaagtgacatatcctgaatgagaaatggcagtttcctacaagctggacgccagacttgaaagaaacagcacgaaatgggaaggtcatctttaagagtctattcttatctgtgaaatatatttacagccaataaaaacaattttttaaaaaaaatttctttgttcactttttgaatcttgaaaccatggaatggaattaatgttaccagcagtaattttattgtctatcttggactgcactcttcagaactttctcactgctgctctcataagactattttttttttccctcctgcagatcagactttatttccagaaatggaaacaacatgaaaactgctgagaaatttgccaacccagcttgcccacatatttatatctgtgtcaggatacagtattgtatttaccaagattaaattatctgctgtcaaaactcaatgaaaatcatggtatacaccaaattgcactttagaaatataagcacctattttttttcaaaatgcaaataacatattgaactatgtatatttacggggttatactgtacaaaatagaaacaatataaaatacaatatataaaagcattttagagacagaaaaaagtacacggttgctaagtttagcagagagagttggatgctgaataactaagaagattctgcagaaatgggttcaagttccacatctgccactcaccatctgtgttcttatacaatcatttaagtagtcacctgcaaatcggggataattcctgccctccctgcttcatttataatgaataaatgtaaacatgtatgtgaatacattatgcaaactataaaatatatataattaaatgcaagaaactttgaaagatgacatatttgaattcccgaagtacttcaatttctgctccaaaactcaattcttctttctagaatcataagattttaaaaatgtaaagaaacttaaacattatgtagtctgcatagtattccatggtatatatgtaccacattttctttatctagtctacccttgatgggcatttaggtttattccacatctttgctattgtgaatagtgctgtgatgaatatacacaggcatgcgtctttatggtagaacaatttagattcccttgagtatatacccaataatgggattgctgggttgaatgataattctgctttgagttatttgaaaaatcaccagactgttctcactatcaagtgggagctaaacattgagaacacatggacacaaagaagggaacgacagacactggggccttcttgagggtggagggaaggaggagggtgagaattgaaaaactacctgttggttactatgcttattacctaggtggtaaaataatctgtacaccaaaaccccgtgacacacaatttacctatataggtaacctccacatgtacccctaaactaaaataaaagttataaaaatagaaaatatcatgtagtcaaactcctttattttacatataactaacataagcccagaaatttttaatcacttatccaagtttaaaaaagaaaaatctaaagaaaaagaaaattttgaaaaagaagtctagattacaatttaatctattgttcttcctggtaaccagctcccctactatttaatatagaagtgtttaacacaaggctgggcatggtagctcacgcctgtaatcccagcactttgagaggccgaggcaggcagatcaccagaggtcgggagttcgacaccagcctgaccaacatggaaaaaccgcgtctctactaaaaatacaaaattagccaggcgtggtggcacatgcctgtaatcccagctacttgggaagctgaggcagaagaatccctttgaacccatgggcagaggctgtggtgggccgagatagtgctattgcactccagcctgggcaacaagagtgaaactccgtctcaaggaaaaaaaaaaaaaatacaaagaagtgtttaacacaatttactgctttaaaaatgattttacattgatatgaaatgttttagttgtaagacatattttctaactaaaatcccattttatttttactaatcccagataggtttcagggcagatattactttcttttgaaagtgtgacttttcagaacaaggagatgagtagcagaaccagtcatggaatcaacattttgtacttcacctggtatattcttccatctttcagcaatgctcatcatattttggctagaagggattctgtttcttttaatagtgctgaatagcatatatttcaaaatgtaggacaaagtaaaattaattttgctgagggagtcttgcaataccctttgtgatgtctggagatactcaatggtatctcaaaactaggataaagaatgcttatactagattattccatctcccaaagtaatttgtctcctaataataatcataattaccttctacagtatccaaactgtagcctctttactaggcaaattatttactgcaggtaggaaacctctggtaaaaactgcttgacaatatgctgctagaaacagtctttcattttccaaatccattctgggaaaccacacaagcacacctactttcaagctcatacgtgaatataaaaggctattttatttttacaaaatgacttattacaggaaaacctagttaagtgaagtattccttgctaaagacataagtaagcagtataaatacacactagacctgctcaaatcaatatttaagcattcaacatatccacaaaatcccaagtaaaacttttgtgcccatttgtcctcttggcaccaagatttttctactctctacctacctctactgccaataaccttataggagcctttcccccatgttctcaatcagggaaggatctcgtgtcatttatatcttccaaataaatgttctaacgcaagtcccagtgttattttcacctaaagccgtatctgtttttgttagtcaagaaaagattttgctttctgtgaaaataatttcagtgtcagtgaataaattgtagcagtattacatgcttctgtgttcagtgtgtttgttgatatcatgtgttgagggggtgaggctgtggggagaagagaaggaaggaaaaggtggaggcaaactcttgtctctgatcttgaaattatgctagtcagttcctactaactacttcatgatacagggagttctggatgcatttgtgtgtgtgtgtgtgtgtgtgaaaagacaaaaagggaagattttctaaattactgacattttggttactaatacaacgctggtcaccaagaatccatggataatgtctgggtgaaatgctttgcatcctctgagccagaaactgctcaaacctattaaaattcatttgtgaatgtccattctataacaatcatcaaaacacaatttcttccaattaaacagcagaaaaatcttcctggggactgatagtgcaacaaggaaagaggatcctacaacctcagttatcacttcacagcagactcactgtggcatgttctaagttctacagccagaaacaccaaaaataaatttcctgttcttccacctggggctctattttcctactgccccaaaacctgacttctagtagaatcaaaaaaattttcccaggtcatggccaggagttaactgagtatagcacagccttctcctttctgacttccagtaggatcaaaaactcttctccaggcatggttagaagttaactgagtgtacaagaaccctgagtttttgtgtttcaatttgcctgatttgcatgtggatatacagccccagatggagaaaactaggagtgggatttatcttacatgattcactgtagacagccaaagcaaaatgtcaaccagtgaatctttgcttctagcctgtccaggaataggccctgggaaaaccttctgactgcactggaactggggggagtggacttgttctgagctgactcaaaaatgctaacagaaaatggcaggctactgcttaagcacagatgtcactttattgtgtcaacttggaaatgatcagtacaatctggcaagtgcaatttttctcacattatgagtgtgtttgagcaggtgctatgcttcactgaggtcatatattgtttccatgttttttaatttttgattcaaattataggatgaaaaagattctcaaatatagacctgtcctaagttttactggagaataaaaacgactaataaatgttttattaataatcagaaaagggtctaatgcttctccccaggggcatatttggtatatatgctttaaacttctactaaatgttgaagaaggaaaaataacagtaaggaaaaatatagaaaatattctccaaaatagatcttctggtggcttctcctatgaccacgatgcattctgttgtcattcacatattgtcttgtttggcaaaagacttgctatttctatagtcactatggaaagttgccacagctactcaaagtaagctgtcattggagggatatgcctttacataaaatagtacctcacagtcggcaggggccactgtgggttctaatggctagctttaaaaagccaaaattgtgtctgtaggatcggtggctctcttgtcctgccaaaagattgagatcagacatggtgactacaatacctccagcactaagagttgcagcttggaaacaagcaatgcaatgcagttgtagctaggttgctgggtagtatgtttagtagatgttttgtctttgaatctttctggttgcccctgaaaagttgtcacatacagtaagcataaggtagacaacagtgcactaagttttagaacatagagaaacataataaatagtcattgctttaagaaaacccttaaggaaaactacagtcaacaaaactgaatatacaaatatctgaacacaaaagtgaacattaaagacagtgttatacatgcagtagcagttctgacagacgcagagagcctgatatacaaagcaattggaaaaacagattcctagaaagttctaaaaaaggccgggcgcggtggctcacgcctgtaatcccagcaccctgggaggccgaggcgggtggatcacgaggtcaggagattgagaccatcctggctaacacggtgaaaacccatctctactaaaaaaaaaataaaaatacaaaaaattagtcgggcgtggtggcgggtacctgtagtcccagctactcgggaggctgaggcaggagaatggcgtgaacctgggaggcagagcttgcagtgaaccgaaattgtgccactgcactccagcctgggcaacagagtgagactctgtctcaaaaaaaaaaaaaagaaaagaaagattactgaaaggtcattatgtgctaggccttttccataatagatttatcttcatgttacagattaaaagaattactcaaaatatgcagactaaaaatctacattaggcactttataaaaggtatcagagctagtaaattagcagagcatggatttcaatctccacccaaagagtccaaagcccacactggatcatttatgactagaggaaaaagggaaagatttacggacacttcaactcatcctcaagagttgtcaggatttgttccgttggaagcaaggatagcaggatattccagtgaggatttcaatatgagcaatgacagcaaggcagggactagtatggcatacactgggcatgaggagataggctgattagaaagggggaaggaaaaaggagtaaagagagagtctggttccagatgacatagggtccagaatctccaaagagattcttagagctggacttaagtttggagatgggatgccgagagtatgtacaaccacttaatgtttcaaacctgacggatctagtttctgaaaccaaatctgactatagtctttattattattattattattatttagaagataaaatactataccaaactgattgtatctctgcccttatgaagtcaagatgaataataaataaatactaaaatagatggtttgatagatgtcaagtttaaatgagaaaataaggcaggaaaggaggacaaggaggataagataggaggtgtataattttatataaggtggcaagaaaaggtctcattgaagtagtaatgtttgaacaaagaactcctccttcctcagtttttttgttgcattgctgcctctctttcccccagtgtggtttaggattatcacaaacaataatcttatatttcctctaagagttattttttcctttgtgctcatatttttgatttatgaaaaggtgcacataactttcaagctatcatgatctttatgtttaagttcataccctgattttctatctgatcaaatgaaaattttcatttgtttttgatataagaagtttaaagtccatccattgtgacacaggtgaaatatgaatctttaatagatttatgtgattccacttcactctgagtcttcatcatagatactctctgtagctttttcgattaaagaaaagccagacacattaacacagattttaagcaattgaaatacagagaagattatcaaatttctagaacttctgattgttctgtatttgatgccttttcttctacagaatttttgaatttggtttttcatcagaacaccattgaagatatcacttaaggaatctagggaatttaagaaatgttaatccccgtgattcaaagtagatattttatcttaaatgtagccacttgtcttaggggtccccaaattataaattggctatataattacctatttcatggtaaatggattattagttcttttttacttctctgatttcacttcttcttcctctttttaaaattaatttatttaaaaagaaggatctgggtgtgaataagtagagatatatttcttgtatgtcttaaaatttaaaaaaattatacaactttccattgacacggaacatttaacaaggtttactttagtatgatattaaaattcaccctataattttaattgggataaatggcatttgttctttccagcagtaggtgggaaagttagaaaacagtatgtgtttcccaagagtctaataggaaaagaatggggttgtgcattttgtccaagactcctactccatagaaacaacaaatcgtctgtataacttgttctgggctttttattttgaaaatcaattattttaagtgtagtcataaatggaaggaacagggaagatgctgccatatagacataaaacagcttgatattattttggtcttaaaaatatcgaaaaaataaaaattttattgaaaatttctgaaaacttatgtaaaaaatggtcatccatcagcatctgatttggtggtttcctgcccataaggcagatacacctactattcaattctgtattgtcaaaaatcttggaaagaatcatgggatgatatgataaaccatcagctctttccaagcactgttatatgtttacagagttggatcagcatccactggtagttccttccagtgaagtctctctagtcagccttcagtacactgtcttaacatatgtccatcactgtggctatactgcatactttctatagtgaacataattgttatgaacaagtacccaagaatgagacttcatgggctcaaatctcagctctgctacttaatagctctatgatcctgggcaagtttcttgacctttgtgtgccttggatttatcatctgttaggataatactagtgcctgtaaaatattagcaccatgcctagcacatagtggtcctacatgttgcctatcattattatttctaaggtctatatatatgaaatattacaaaatccatactttaaacacttgaaataaaagaagaattagatgccacacatatccttaaatttcctttgttgtaactttttaattaagtgcacacctatacacctattgctgaagtttcaagttattcagattatccaaccagataaactgaggcaccattttctaaaaagggagaagatgaaggagggagaaatgtggagagtgaggagggaagtaccaggacttcaatttagaacacataaaggttgagatacctgtgagatatacaactgaaaatgttaagtacaattttgcatgcaaaaatctgaatatgacatgtctgggctaatgacagaaatatcagagttactggcataatgatagtatttaagggcatgagaatggatgagattagttggacgagggatattaagtgaggagacttctggaatcatgtcctgtgaaacatcaacatttaggagacaggtagagcagcagagttggtggacaccttggaagaagtcacagaggaaggaggacaaccatgtgtgtttagtgccttgttttgaaattgattaagtattgagtaggatgattagataatgagtaggatgatatctgaaaaatatttaatgaatttgacaatgtgaagatgattggtgttctttgcaataggagttttggctacatgctttcacgggagccagattggagtgggttgaatagtgaacgtgggtgactaattgacattaggttttattcataattgaaaactttcacagagcttggctgtgaaggaaaaccaagaaaaagcgcatgaggtagatgtttaaggttaggtcaagagaagcaatgtttggtttatttgtttgtaagattagtacaatccattaaataatattgacaattcaagggggggagagaaataacagaaagactaagtacttgaatagataagcaggataagacagtaagcacagttccaaaatacagtatatgaagaagaaagtggagatggtgtgaatataggagaattttcttcttattgcttttagctttgtcttcaagtacggccttggccttcagtcgtatagaaagtgtgaggccagaaatgggtcatttgtgagtttgtatgaggacagctagcagctcatgttcttattatctgtttgttagtctgaggggtggagcactggtaactaagtgatgtcatgttaccgagtagaaagggaacttcactgagaattagaattccagggtcctagtttgcaatgtgcctctaaatcagtatgtgatctgggcctaagcatttgaaaatctctgaacctcagcttttattttatagaaggagaggcttggggatcctttagaatgaccagtgaatgatccatgccactgtttggttcattacagaacttaaagaaggtcttcaaactgcagctattcacagtcaaaatagttccatatatacaatacttatttgtgttcatggactaaacatgtaaaaccttccagactttcaatatacactttataaaatctgtcctctgttgtctgtggggatttttttctgtcttatagattgccatttggaaatttaaaaataacttaaatatttgactgtttaattacaaaaatgtacctggggcataaaaggaagaattaaacataaaatttgatttgaattcttggtattatagatggactgcttttgaggagaaaactactgctaaccacaacctgttcatcaaggatttttcacttcctccttcactgcttttgtgactttaagtgtgctttataaatttccgtccaatgacagcacaatcaaggcatgcaatgattctttcattcttctctgataaaaatctttagtcttagatagctaaaagtgtagtcaaagacatttaattttagccttggggtatccattctctgtcacaggaaaaaataaatatacataaaagtaataagatttcatagaaaacagtgtgggacagagctgcctgactttaattttctgaaatgcaaggggatgcaattaactccctggttgtgattagcctcttggaagctgaataacctcagtaaattacagcacccacagaacccataatggcgtcatatactcaatattgtttacttgtctttggatttacagtcctgcagatgagtcataggatttatgcattaataatgaatcaagccaacttcaagaagcagcgctgcctctactcgaattacgtgtctgcctatcggacctttttaaagtaggtattggccaggactagtttgaggcactggctcaggggcaatatttaagaggacaccaaaaagtcagtgagtaagataaataacattttaaatcaataccttaaaaatcaaaattaatattttaaaaataaaaagttgttcatgatgaataacatatcaaaattttaaataaagacaagatcaataacagtggtatcctgagctgtactggagcctgaggcaaaagggaaattcaataatattgatgctgtctttatttaaatttttcacattttgttcatcatatatttttgcattattcagattgtttttttcaaatattgcagtaaaatataatttatcttgattactgagctttttggttcccccttaaatttaacactcaggcaagtgcctgaccctcatctcagcatttataatttaacaccaaaataactggcatgcaggaagcactgtgcccgtaacttgttcctgctgccataataaaagcagactttgcctctggaagcattccacattttaccccactaagttcttttccttttagtttccataaaagggtttattcatgtgctgtcctaaaagagtcctgctggatggcccgcaataccccacataaccaaaacaaccactgcatcaggagagataaagagtatcaggaaggaaaataaattccatatattttgctcaaaatcctggaacagttgtaaggaaggcagtcgcaaagaagtaaagtttttcaactagaggaagtacgtgaatctctcagtgcatatacctaacaaatgtagatagtcaatagcttttatccacataactcttggatcacaaagggaatgaatcattgcagtcaaagaaaaacaatttacaaggaggctgtgtccaatctcaaaaggcaactaaatgaaattctgagctctgaaaaatctgagatccgcctttattatcctcccaatttgtgaaccactcacctcagcaagactacaaactccatgaggggaagaacaaggacttcttgtttgcttatctttgtatccttagtgtattaggatacatgggaatttcacttatccctatactctgcacgaggaaataattgccacaatgtaggtggatgggtataattgtcaaccttaagcaatgacatatgaaaggactttcacagcaaatgagcaaacggtatgacagaaaaatagggtatgttagggcaaggacacctgtggcaatatttctacctagggattggaaagaggagattttctcaggagaaggcccctcaggactagggacatcccctactctttgtccattcctcctctccattgcttttctaaaagataggtcctgaaacatggtattgacattctcaatttctttatctttttaaatagacattaaaaaattcataaactgcaaggcctggtttaagttatccctcactcataaagcctaagatatttatactgtattgtatcatattattcttgattatacaccaactcatattgctcactaaagcacataaggtaactttgtgtgaactggaaaaaaaagaaaaaaaaaagaaaggtgtgccttcatcaagacacatagttgcagaaaaccgtatcaaaataatggtgcaactagttgaggtggatggtgccttttacatttttgtaatatataaattgtacaatcctatgcaatgacccttggtcactatgtctggcttttattttatatctacatagtaaagttaactccttacttccttccctccttcccccagtcccttcctccctccctcttttcactccttccttcctttcctatctccccctgcttgccccttccttccttccctccttcctttcctccttccttccttccatcctttcccctgttcctccctcccttcctgcctcccttccttccctccctccttccccgtcttcctccctccctcccttccttccttccctcccttccttccctccttctttccttccttccttctttcctccttccttccttcctccctccctccctctttttctttgttccttccttcctttactcttctttgttctcaatacttaacataatcctaaacccatagcaaatactgagtaatactttttggctgttgaattgaaatcctcctttaaaaggggagacacctaactgtgaaatcataggtgattttattttgtcttctacttgttctatattttaattgttatacaaatatgcattatttttataattagacaaaaatgatttaaacctgccaacaaatttagatgttaagtacttattcaatggccaagcccaagtaattgtgccttgtctgatttgagggaaagtgccctgcatatttacaaaaatgtattataataccatgcaattcaggtaatgcaatcctttatcttcttgttaaataaaattatctctttaccatattgctacattttagatctctctaataatgactgcaactgtcatgtagtgagtagaatggaaaatccctcaaatatcagattgcattctgatactttgaccccaaactaatcaaactaaatataaattttgacattttttctggcccttccacagatttaaaaagcaatgctgtctgggcatggtggctcatgcctgtaatctcagcactttgggaggccaaggtgggcagatcactggaggtcagaatttcgagatcagcctggccaacatggtgaaaccccatctgtactattaataaaaatacataaattagccaggtgtggtggcacacacctgtaattccagctacttgggaggctgaggcacaagaactgcttgaacctgggaggcagaggttgcagtgagctcagattgtgacactgctctccagcctgggtgacagagtgagactctgtctcaaaaaaaaaaaaaaaaaaaaaaaaaaggaattctgtcccagaaaaggtcgatctgaaatcaaattcatatatatatacatatatatatatttcaaaagatagctctgtttacatccaggattttctttgtttttatttttagaaataatcagaaatctcacttggtttctattaaaaatgcatttagctaatattcacctgtgtgagtgctgggagattcctagatttttaaaaatcacatagtaagcaggggaacgttatatatatatatatatatatatatatatatatatatatatacctaattccctaaatgtactatctatcctgcttatggcttcttcagttgaaataaaaatctcaccacaaatgaaatagagaacttcactaatttccattcaccaatgatggcagaagccccccatgggttattaagtctgagagatgtgtgaacaaacatgataataagcaagtaaagtgtatcgtaaaatatactgtgttcatttattgtgacaactggggtgtaattatactaggaaatgtactgcactttagtcagtgaaagtaataaaatttgaacaccaggagacctttctctactccgtgctattaagctacttttgaggggaaggtgaaaaatctaaaaatatagaatgaatgttcacttttatagattagcaaagcaggggttagtcagattctctggtcgtctaataaataaaaactctgttctttcctcattagctgtggatacaccaccaaagaacattttcctcaatttctgggtaattataatgcctaactttatgtggattgcttatgctattcatctcactttctccctccaattaaagaatagaacggcaaaaccaaacctgactccattgtattgtaactgcttctacaaagctacaagtagaaaagcaggaaaaaaacgtgcaaaaagataaggaaacaaaggggccctcggagatgataatgttgcacaatgaggagtaggtgtaatgattaaagcattagtggtggtcactaggaaacgtgaaaggaacatgtaatttcagattaggaaaccctgagcttcccagagtgaactgctatttgggaaagtgtagttaattgaattttatgacactttttactaaactaaaatgcatatcttttattaccctaatagtttcattgctactgtgatacttatgtgcagtgatacactaaaaagcatatgcaacaattcactaaagagcaccggagtggattattaccgtttccttttgtgctttggcagccgacaatccagatcataattacaggattggagccacctgccgactcactgaacagaagcacgtggctccacataaaatagagcaattctaacactaaaatatacaaaataaaataaaataaataaataaaagaaagaactatgttaaaccaaagagaccttcaggaacagcctatggaaagctggatatttattttttcatgaacgccaaatgactgactctcacattattactggcccagaacgaagcagagtttgccaagatcttcctggttaaactagatcatctaatgaaatatctgcatcccaaattgactggtgaattcagaccttttatggtcaaattcacaataaatctttgattttagagcatattatttctaatgcatagacgcaggaatgcaggaattgtcttcacttgtataaaactgttgccttggcatgcatttagcctgctaaaccagtggagattaccaaaaagtaaaagtaatgtaaaaatggtgaagtcaagaaagtgaatccatacagaatttttctaattggatattctcatttactaaacaagttaatccaaaagacgacattatttctttctgaatttttccaaatatcactttctaagagaagtcttccctcatttccttaagtcgacttagtcactccttcctctgccctttttacatgcttctattagagcagtgcttcttacacttccatgtgcatatgaatcatctgggatcttgttaaaagcatattcagagtcagtaggtgtgtgggggagggaaggtctgtgagtttgcatctttagtaagcttgcaggtgctgctgatgctcctggtcctctgaccacattaaatttcaacttttattttaaatatgggagtgcatgtgcaggtttgttacatgggtatatgtcactacattttgaaaagcaaggtattaaattacttcataaattgtcccataatgatctgtacatgtcaggcatttcctcttgtgtatgagctccttgaaagcaaaggcaaaggcagtatctcaatagctaccaattatataattcctactagttttggggtacagggaggatgttaccatacatcatctttaattctcaaatcaaccctgcaagatctgtaattgtgtttccattttacagatgaagaagctgactctcagatatgttaatcaacttgtctatggccacacagatgccatgtggcagtcagaatgcaattctggatctatttgtctccaaagtctgttttttctactgcacctgaagcctcatctgtttacttctgtaaatatagagtgtagcaaagtacctattgttatagaaggtgctcaagggatgtgtcttgctctgtgatcactttatatataaattcacctttgctcacagtatctcccttgtgtgaaatgctcttcctgcttctgtcttcccaattaaggtccatctcacttccaacgctcatttctacttagccagcacacaattgtgcctttcctctcttctgaatgcacacggcaatggtttgcagcacacaatgagcacttaaattgttagttatcttattaacagtatatttacttcattccataaatatatactgagtatatattaaacaccaggcatggttggaagcacttgtgataggtcatggagcaaaacagaaaaaaaaaaaaaatcccttctatcctgggtcttggaaataatttccccaactaaaatgaagacttctttgaggcagggacccaatcactccactttctgtatttctcattatgttttgcacatagtaactgctcaattaataatagtctcagtaaggtaatttaccatgtagatatgttcctaatatacagagtggaactacacacaaggcctttctcttttctcataagttatccttggaaagtgaaacgatgctttcacgctgtttctcactttcctccaactgcgttttaggccagaagcagaggtattaaagtcacacacagtgcaggtatcagccagagagacagaattcactaaaatttaatcatagcagcttttagcacaaaaaatatcttttcacaagtgtagaaattataggcaggagagataacctcatgaaaagttactttcactagcaaatatcttttttcctttacactccgaaacaattgactagaaacctgctaactaggagaagtcacatgcttaaaatttcacaatattttgttgtcgtttgagtcaaggtctccctctgttgagtgcagtggcatcatcactcactgcaacctccgcctctcggattcaagggatccttctacttcagcctcctaggtagctgggactacaggtgcatgccaccacacccagctaatatttttgcattttttgtagagacagggctttgccatgttgaccaggctggtctggaactcccaggctcaagcgatctgcccagtttggcctcctaaagtgctggtattacaggcgtgagtcaccacgcctggcctacttcacaatattttgttcaacaacattttgaatgtgcactatctgaaataaaaagtataaatgttttcctggttatttgaaatgctccattttctacttcacaaaaccatcatttttaaagtctgctcattcactgaacgaggtatacaaagctattctttttgaaggtatagctcttctaaagcttcattaggttgttagtcacatgtattaacatgtacaggaggcagacctgcagatgagcaatttagaagggaaaatagtactcaccttgctctgcatcggttcttcctcatttttgcaatttcttatgttaaataaatctacatatattaatctaccttgtatacattttaaaacatttgaaagagaagaatgcagataactcttctcaacttagctattttattcaatactgagatatttcataacacgatctgtggatggcagaaaatggaatttgaaatgagttctaattcttattaacatgagaacacaggcatacatcttaagtacagtttttgtaaaattgatgtcacaatttttattatgcaagaatgttatgagaagaaatatatttaacatatcaaatcctagtttattgctgatgtttagttagtagtagtattcctgcctatattaacacttacacatacacaattatattactgttttttaattatgaaaaagcatttatttacataccagtaataattacaccagcatttagctaagcaagtacacaggcatgatctctgcattcgcaaaatatttcaacttaaagttgatgtaagtagatatctgaaagaagttataaataaatagctacataaacatgaaagaaaaagaataggtgaagtctttgccctgtgtctcaggattaattcaaagtttccttgctgaaaagaggaagacatcccattaatcagatttctttttccaagttcttcctttttataggaattggcaggaaaggtctttggctaaaatacagcttaagattcgtgtactgtggctgagctgtaggctgcatcctagaagagccttaaacataagtaaaaataggtctgagggttgaggaaaaagaagagaaagaatatagtgacaatgaatcacggactcttagctctacagaccttaaagacaaggcaaaccaaatccctcattttataatgaggaaactggggcccacacagctgaagtgacttgctcaaggccacatactgggattacagccgaagaatctttgcatgtaaatcctatgtgatttaaaaagaaataaatatgaagatcttactagatatgggctgctaaccagatgggaaactgtgtttggaattgctggtaaactggaatcaatttgtttagcaagtggtaagaatatacaaacatggggaatgttttaggcaacgaaaaagaatgtcatgtgaagaatatgtacctaatataaatggcaattttgacagtggttctgttgattcaagttttttgtgggtttaaatctctttacagacaaggatgaaactttaattctcaatctatataaattatcaggctattatttcaaagaacacaaaagaatagtaatagagaaatgtacacttggatttggtcattctcctcacactggagggaaaattttgccttgaatagcatgaataatgagaacaggaacttttcaaacattttcaatattgccagccaatgggagaggctgataatcaaaatgaaattttgtattcttttcaaatcaccatatattaaatatccaagatagtattaaaaccctctcataaatgttgccatgatgttctatttacaaaatttctttgggaacaactttcattctattaaagtctttcattatctggaaagcaaagaactaaagaaaggactttaaagataatctaatagtctaatagtccttcaatgtaagggtatattagaatcatatggaggctcctaaaacatagatttcagagcactacctcccagagttcccggttcaggaggtctggggtgagatctaagaatatgtatttctgacagattcacaggcaatgttgacaatgctgatccaggtaccaccgtttgggaatgactaatctagtcaaactatctattattagtctaattaccttctttttgattcaggtagacaaattctagtattcttggaacttattatttaaactttttttctcaactcctccaacaaccaatttgttctgtttctgatgttgtcactatactcatcacctattaagctgatttcaggtatattctactaaaatattgaaccaaaacaatcacgcaaactaagtctcttgttcttggtacggttgcatatataaatgctatcttttgcataattaatacggaaagaaaaatcaccaagaacattttcaattccaactataccacatcaaatggacatttgggtctcctgtggcttctgcaaagggaacacatagagaattcttcagggacactggaggactaaagcagagcacagaagtgatatgctactactgtaagagaaatgggattattatctccagagagcttatgttattgctggaaaaatacttcaagagtgtcaaatcttaaagcttacataaaaaagatcaaataagtattgtagcatttcacaatgatctgatgattcccgtagtatcagctaatcagtgggaaaaaagtaaagtgaccaaaaaatagttatcttgaaatgacaaaatatcctagcagttgtcaaaattaatatgataatatacaggccaggtgaggtggctcacgcctgtaatcccagcactttgaggccgaggtgggcagatcacttgaggtcaggagttcaagaccagcctgggcaacatggtgaaaccccatctctcctaaaaatacaaaaagcagtggggcgtagtggcgcatgcctgtaatctcagctccttgggaggctgaggcacgagaatcgcttgaacctgggaggcagaggttgtggtgagccaaaatcatgccactgcactccagcaagggtgacagagtgagaatccatctcgaagtaaataaataaataaataaaaataattaatatgataatatacaaatcagggctgctgcaatggaatgtgaagaaaatagaaaatgtttgctaaatccatcatctcccatgatatgtatacgtgcccatgaacatatacacatacacactcacatacaaacttttcctagatacacacacagaacctttactcaaagcattttgttcctagttacggaataaagatattgaaaaatgcattttcattaatgtgataaagcataataaattactcctgccagatgtgatgtgacatgtacatattttcttaaaagagctgtagaaatgggcaaagatcacacacacacacacacacacacacacacacacacacacagttaattaacggatcctccaagacaccaatcttcaaatattactgagcatttaataagtgttatgagaaataataccaaaaacagaagaatgagataataaactacagatgagaaataaagacttatacacataaaaagacaactctagacagtaaatatttgggttcagaagcagaagaaccatcaagtaatcaaagactgcactactctggatgaacttgatgtgagctggatcatctccacaggctgaattttcttaggcagagcggaaggagggaaggaagaggacagcccaaatgagggcatcatttagcagggatgaaggcataaagaaaaggtattgactacaccagtgtgtctctatacttctctgaatcaaagagttgatgccagagcatgtgaagaacaaagcatgctgtagagttgtcgcataagattgtggaggaacttaaatgtggaaagaataaaagaatgccagaaaaactgcatgttaacaaaacctactgacaacattagaaaaggaaatattgagatagtggagagagaattttcctggagacctcaaaaccataaatgagagataatactgaagacctactccatttggctttacatggccatagctttcagggactcagataccgtaggcactgaatgtcaaaagagaggttgcatttagaactcaggcagcagcctctcatactgcactctatagatcaattttagtttaatgagatttaattttaaaatccttaggttttatctttagcacttcaacacactgaaaatgcttccaggttttgatttacagaattactgtcactgtcaataaaagaaatgtgcctgacacaccaaaatccagtttaattacttctgtaatgtctcctgcagctaagaggaaatggtatttctctgacacttttctgtttttaatttagcaaaatggagcactttcccttaataggacctgggacagcagattcagaattgatgtcatcaaagatggaccccacagtttcagcaacactgtcttactctgactgtgcaatgattgcatgaatctggatccttggtattggattccttgaagctgggcactcatcaaagatttgacacggaatcatggctgggatatttagacattatgtcatcacttggagaagctttgcaagcaaattcaacagcctgcttctacctagaactcttaacaatgtcagcattgccctgaactgctggaatccagatgaggccttgaaagcttccaaatagaactgccaaatatcaaaatatacactgtaccactggagtgaagaaaccaagaaaaaatgtgtactttatatcttctgctacatattccatctgcttctctccctaaagggtcatatgttatatatttataagaagtgttcacacctacgcgaacagtttccactgtctccttcaaatacagcctcctccttgttcaagacccatttttttaaattcttctatggtagctgaaccttttatgaaacttgttccattctgaaatcatttcaagttaagaaatgcccttgtaccttcctatctcaccaaatcctggggagattaagcctcacactctataggcctttttctgagagatgtgaatttagatcattagggtcattaaaatcacacaatctataatactcagagctaacatatcacctttgtgctttatgctgctatagaatgctacaagagagttaaaacacgtatagcatcacagaactgtagagaaggccataattcctccccataaaagaattctatactttttaactggcacagtaaatctcattaaagacacagaatgctttgttcagggaagcaaaagggatccctgggcaaggtgcgtttccttcacagtaatattttttttccttatgacttgaattattccttaatgcaagcacaatgttatttttatcttgaccttttttctggactctacatgtttccccaggctttttttcccttccctacaaaaatgaggggcccttggtcttcactattaatcttgtattaacttttaatacactgggcttcatgcatcctcttgtatttctctgtgtatctaccaaagaccttcataggccacactaataacctccgacttagtctttttttctttctgcctcaacaactgtataaagaataaactcaggtataattaacataataaatcatttggtgcacattcattggtcaacacaattctgaatcttaacagttaatttcccactatacagattgtgaatctgattcacataaaagtactttgggaagtattttgtctgatttcactatcaaatattagattattatttttgagaaactcagaaaggctgtcatggaaaaatcacagaaaattcccatctctctttcataatcagtacctttttaataacagagctggaagttaatgacagtatgcttttgacagctcactctgaaattttaactcatctgtagaagtgccaactgagcagttgaggggaaaagcataaggtttaaatttacatctaagaattaagagtgagaaaagcatggaaaaacattacacagtgttaaagtgcacttattactaatttctctagggaattttgcagctagggaatttcagttgcattattattgaatctatccccctttaacagagactgtgggtacagaaaagaatatggccttgaaggcagacgcattcaagttctgtttgtgccaactactaaccatttcagcccaaagaagttacttaaaatattcatacctcacaatcagcaaagggaagagacaatctaaagaactggagaaaatatttgcagactattaatccaaagaaaaagtaataaccagaatacataaagaactcaaacaattcaatcataaaataattataacaaataattgaatttttaaaatgggcaaaagaagacattcctcaaaagaagacatataaatggtcaacaggaatataaaaaaaatgcttgatatcactaatcatcagagaaatgcaaaaatcacattaagacatcaaaatcaaaatcacaatgagatagcatctcactccagttaatatggctattataaaaaagacataaaataacacatgctggcaaaaatttggaaaaagagaaatgcttgtacactgctggtggaaatgtgaattagtacaaccactatggagaatagcttggtggttcctcaaaaaatcaaacacataactaccgtatgatccagcaatctcactgctgagtatatatccaaaagaaaggaaatcagtatatcgaagagataattgcattcccatgtttactgcagcactattcacaataaccaagataagaaatcaacctaagaatctgtggataaacggataaagaaaaaaatggtatatatattccaatacgagttgaactggaggtcattatgttaagtgaaacaagccaggctcagaaagacaaatatcgcatgttctcactcatatgtgcgagctagtaaaattgacctcttggagacagtgaatagagtagaataggtggtaaccagaggccataaagggtagaaaggtggagaggatgaagaggggttggttgatgtatacaaagataaagataagtagaagaaataagagtagtgtttgataacacaatatggcaaatacagttaacaatattttattgcatatttcaaaatagctagaagagtggaattggaatgttcccaacaaaaataagtgataaatattttaaatgatggatacccaattacccagatttgatcattacacattgtgtgcttatattaaaataccacatgtaccccctaaatatgtacaactatcatgtattcataattttttttttttttgagatggagtttcacttttgttgcccaggctggagtgcaatggcacaatcttggctcactgcaacctcctcctctcgggttcaagtgattctgctacctcagcctcctgagtagctggaattacaggcatgtaccaccaggcccagctaatttttttgtatttttagtagagatggtgtttcaccatattggccaggatggtctcgaactcctaatcttgtgatccatctgcctcagcttcccaaagtgctgggattacaggcatgagtcactgtgcccggcataaaattttaaaaaatctatttatgcttcagtattcttctttttacatttaaagtaatcagatatttttggagaaaaggtaaagcttataaaatttaaatggcatgcatataatacatattaattatgatattagcactgaaatatgttgatgtaatctacataaattttttgtagttctttttatgcactagctaggcatatccacagcaacaaagtatagaaacaacctaggcctgatctaacacttctttccaaatccaatcataattatattattttaaaataaaagatttcataaattataaggtaattatgtgtaatcctatactttaaaaacactcctgataatttgatttcataaagtgggagaagtatttaaccgtttgctctcttcaaatatcttcctgattaataaaatgatactaagtatttttttacttttattttagatccagaggtacatgtgaaagtttgttacataggtaaacttgtgtcacatgggtttgttgtacagatcacttcatcacccaggtattaagcctagtagccaataattattttttctgctcctctccctcttcccactccaccctcaagtagactgtggtgtctgctgctcccttctttgcgttcatgagttcacgtagtttagctcccacttacaaatgggaacatgtggtatttggttttctgttcctgcattcatttgctaaggaaaatagcctccagctccatccattatcccacaaaagacattatctcatttctttttatgtttgcatggtattctatggtgtatatgtaccacattttctttattcaatctgtcatactaagccatttattatttgtacttatttggtattgtgcaaggttctgataattcactgtgatttatcttcagtttgttcacacgggcttttggtacatcatttttagagaagtaaaatctatataaaaagtaaaattaaacttaatggctccaagtgtcaacagttagcacctctgattaaggcagtatccccatcctgccttgattctgcacctgttgtgttgctacagatggaagtaacatgataaacacggatatataatgcattcgcatggaaaaaaaacattcagatgaggctatctatttgaatagcatttagtgataactaaaaccattgtctttccttgagaatagttagtcaaggtgactagcaaaacctcctctgaatgcagctctggttagctgggctctggtgagataggatagtgttaccacagtaagaccaacattgaaagccacctccatatttacctataagatcgatgatgaagagtgctaacatttgagccaaattaaggtctacacagacagagttttaatgaagccagaaaaattagagcatactagcaggaaaatccataggtgaagaaaacattctgactgggtttgcttcctttttgatttctaggggccaaggtggcagaattcacagactaaaaggctgctgagagttgaatcatcaagctgctcaacagtgcaagggactaacatagataattcaaatacagcattactctattcccttttttgttgtttttctccccacctaaattttctcatatagatacagactgaaactattattcagctgcccaacaataatataaaaagaccaatgcttccatttatgcatctacttttatgatgtcaattctaaaaagaagaacaaagataagtttacgtaaaatagtagcagatagcacttctatgacatattacatttctctgtcatacattatgctttattttctgtccttcattacattttcttacttagtaggaaaaatattttaatcctttatcattcacctgaggcaggtctgaccctgtttccccatagtttttttaaggtgttttcagtaaagattgcttatgaattgctttaaacagcttaagggcttccacttagaaaaaattcaaggttaataagattcatcatactcacaaagagtatctggttgtggacatagctacttgctaaattttattcagccctaagtgacaccagcagcaaatcagctcacagcttaatactactggcaactctaaatgggagagaagtaacattactcagatccaggtttttaaaaatatatgttatgattcacttccattagttcatatattgatgctcagacactggatattggattctctttcaaacaacaaaagaagctgagaaacaaagctgaagatatttttaaatgtcatggtaaaaagtcacagggaagtgtattttatcctcatttcagcgaatgtttctaactctcatatgaaagatacaataaattcctatcagaaagattttctcttggcaaagtttaggattctgaaaacagccttttaataaaacagcacccacaccctcctaagctgtagcaccaaaataacagcactatgttatattcttcccttatggtaacagacactgttgaagctgaactgtaatttggcatacaacatttctatactaatgtaatgtgacaatgttattatgttcgctattttgcatacggtcatagccatgttcatcttctccaacctgacattaagttagcttaatatggtaacattctattccggaccactgggtaaaaggagaaaaggattattgtgtagcacactggtgtgatgatggtggacgaatgtgtaagtattaataggtgatatataaaatttacaatgaatgtaaacttttagcacagaactggcacatagtaagtgctcagcaaatggttacatccaagagaaatttcataaacagctacaccatacaatgtagtccagcacactgtttcctacaatttcagaagagggaaaaataatgtcaagctcagaaaacaaaggaagtttccatgggacaaaagagttttagtagagattgaaaaggaaattatatttcttcaagcagacatagtgaaagaatgcattccaggtggaatgaatgcattttccaggtggggaaattagcataagcaatggtgaggaaattggaaagtgtaatgttgttcagaaagctgtaagtaaattggcagtaatatgccatatggacaaggttctgcaacagataagtatgaacatgaaggctggggtcagaccattgaggtccacgaattccacattgactaacttggagagtagtattggacactgaggatatatttgaaattcttctgcaagatgcatgtgtctagcacgctttgattttagtgagttattacaattacatgcagcatgctataaaaacactgggcttataaaccaagaaaacagagaagaatgttattcctagtagaagtatagagtcttatagggaggtaagactaaacataggtaactataaggaaaaagtgatggcaaattaaatagtataaacaaaattctataggaagccagaggagaaaaaaaatattgcctctggttaggagaattaggagagactgatgacatttaaactaggaagaatagaaagaaagaacaaaactggcagagaggcacagaatggatcagaggaaagaggaataagaaatgggagataactaagaaattacatgatataccagaaaaattatacagaggatctaaaatttggtattgatatggaagaaaacttgaagaggtgagtatatgacattaccctgtacacacacctgcatatccacatacacacatgcacaaaacaattgtttttgtcagtgagtaggtcacttagatggcaattttccggggaagaaagggtttaacaaacatttcattaaaaatagcctttggcatcattttgaatagcacttctttttgaaagattcctttcagttcaattaattagtatgatttatccaagattacatttacaagctacaaagtattcccatcttcccattgttaattatatctccaggctaatataaatacattttttctagttaccctaacccactctataaaccttatcagcgagatgacatttagaaattctattttgggggagggaaggtctcatttgtaatgtggcatgttcgtttccccattaaaaagttttgtttctattttcttttttgttttctatgtaattggaggctgcaatcacagaatttatgaaaaaataaactagagatgaaaatttcattaagaagtgaaatgccttaaatggctttattttaaaagaaaaatcagcttctatacagaaaaggagtttgttaaaaccccaggaatcacactaattctatttgtgcatcttagagaaaaacagtgagatgtacagacaagatttattttgatcaatttaaaaagtgaggaaagtgttgcatgctatttctattgcttattaattccacgtcttcaaagtaacaattgctactatatcttctaccaattataattgatacaaaataagatttgcttttgaatattgatttgtacctatgtattctcaccactgaaactccaacgtataagccaaggaaccatttcacattttcagaaaacccactaacaggtaatgatttaatcaaaatgcatgtattctgagagctctctaaagtaattttaatgctgatttgtgcaagaggcatatcaggagacacatttattgaatgacatttacctatttacaagaaaataacgaatagccttatcattgtcatcaccagtactatcacccaagagcagcattaaaatagttttctgtaaaaatcattcgaagacagcatgatacttatggttgtatcttggtgtttctttagggaaagtctaacaaatacatacacaaaattatattctttatatttaactggtatatgaggatacacagtctgccacaaccaaatggcaactgtatgtaaaacatggaaactacattaagcatagtttggcagaaaaagttctttagcaacatgaaaaatattttcacaccaaaaaaatccctctcaactaccacatgtagtcatacatctgtcaggattgtattcaggatgaaaaatttgcgataataaaatcttaacaagtattcagtcttctgattgtccttgaaaataaatttacgccattttctgtgaggcaggaacaaatgcaggaagtaatttacctatacacacatatacatatccttatgaaaagcacatgtaaggctgctatatgtatatatatttattaagactttatgtaaagttgtttatataactcaaaatggcgttattgtgttttaagtgtgatttggcttgcagagtgttcgcaaatgtatgatagtttgaatacatgtttattgcttcaggtttactgtaattctatgggagaggaaactagtaaaatgaagaacaaatatttctccatctacagtggcatggttgttaaaggcctcttccacatatgttttaactctgtattggttgtgcgtttttccaatagtcaatattttggaaaggaaacctaaagacagcaggtaaattgtactttattgctaggctgcaacaactcagttcagaggattactgtagctttaccccatcttctacattgcgatgcacatatctgttgacatgaatacagtctcaaatagacaaaggtcaaaatgaacaagctctactctttctttaaatccacattcaaattcagcctctgctacaaaatctaaaccttcaaccgttgcatcttctattccatcatcctggaggtttagcttaagtgttgtagcactgacaacatatagcacgtattctattttacaaccaggtcaatttgtcaggaatattctcttaatatagcagaatgcaatgttttgtatgaaattcttttatcattttgatgatgtgctgtaaatcaggacctattagaacattaagacacagaacttcatcttatagatcagttaattccatcttcaaaccctcactgctgtgatataaattaggcactagcagatatgccatgatataatgtgaatcatgtgttttattttcatgcttatattgtaatacttagttaaaggattttaaggggaaaaacataagttgctaagatacaagggagaatggctgaagggacaatgtttgaacatatttttttaaaagtaaaaggcagcaatgggcttaaagagatgtacgcagagagaaaaatgagacctgtaaccattcagtaaaattacagccctcgagacataatcatatgaaattaagtattatttaatataaaacaatatgaaggttctttcaaaaaccaagggagaattgtcatatattggaaatgaaaaacattcttttgaacaaggtgatcattagtaattaaaaaataacaataaacccaaaaaccaaagaatcaccatcatcacaggatttagccactttaacaattagtatttcaaaactgtcctttccgtagaaacaactgcttctatgggttatgacagttcgactgactcagagttaatataaggactttcagtgttagactttagatatcaaacagtaactggaagcaacgatgagtatcagtccatactcagagaggtacttacggtcattgcagagtggtccactgaaggaagtcatactacagtcacagctgaagccatcccattgttgcaagcacacaccttgattggaacatgagtcctcttggcaggttgtgctgggccctgcaaaacaatccaaaggaaacttgggttctttaaaagaatccaaaagcattttatacatgagctagatcacatgtagtagttgccaacaccacagatgatatgtccaaactagtttttaaagttctagttcacacacctgaattaggaactgagaggctgtaatatgaaggttttcttaagtttcaagtataggataaaatacattataatcataaactaaaccaacaaatagcaaaaacaagcacatagcttctagtatgattattgtagcaggtaatctcattccaacttcaataattctttatcactattttgattttagaaaatgaatggatctccttaacattctgaccaatgaatagagacataatgagaaatggagattataacttcatgaaattgagataagattggcaaaataactgaagagagttatgcaaaaatgccctagaggtttccaaacgataaagttatgattgctgggtgttttgaataggtatgttggcaagtatcaattcacatgcttttaacaatttcatgcaattaaacataaaattaaaaactccatataaatggcatgccctcaataaacatacaagtaaaaagaatgctagtctatttctaaagaatcataactagaacactgaaaaacaaagaactaaaaaaagcatgatcaaagcactaaaggcaatcactatacaaacatattcaagactgaaagcctttatacaaactatgctacaaagttaggcttcttgcacaacgttcaagaaaggaaaagaatgaaatctgaacccaaataacagttactgcagaaatgtaaaatatgttattttagggtttccactgtgtattatggggtttcagtcttgttatatacacacagggctatctaccttgcaagtcagctttcatcaatgcaactttgtcagcaaaataaaaaaaaaagcaaaatatattaaatgttagtaagcaatactgaaatggggcaaacacagaagaatgttcagattcaaaaggcatgctgctgtaaagagggagaaaaatgctatgtagagcaaacaaattaatactaacagccataaatcttaagagaagccaaaaatgagaaagcagaaatttattagaatttaattgtacatatgtatatatataatggttaattgagccaatgacatgtaatgaaggaaaattaaaagggcctttgtatgtttcctctcttggatagatatgaatgcattaccaaagtgactgtgttgcttatttggaacatgcagcaccattcatcatgtgcagatacagtgtagactatgatcagtagcaaagcaattatccctttctatgtttttccctctagatcctttatctttctgttgcaattaaggcttcaaaccgtaatgccagccattcactgacaacagctggactttagagtgacaccaaccaaatgctgcataaatgatactgtatatcatttagagtggatgaaagaagtaggaaggatggaagaaataaactgcaatataatccatcataaaggaattttctgaataaaatttccatgtgcagcgtttatccttgaacttaccagattgggtatatgccacttatgaatttcagagttacgtctgtattttctacactttcacaagtattttcaactcttataaacttccctgtggaataactgttacagtaaaacctcactaataagaacctatcttagaggagggtgaaaagggaatacagtctacctaaatagctttagagtataaactaaatatattttctagtaaataaacatataggttttataaaaatagaaaaaaagacaacagctaattagatgctattaatgtaaaagagagagcctctgaggtgcctgctttagtgaataaattagaattttctgtaattatattttgtataaatagatgattttgaaaatggcttctaaacatgtaccttacaatcacatttgtattataaatttttagtaaagatactctttattgaatgttattgaatttagcctagcctctgagaattcacaaattcagaaaccatgatattgtaaatcttaattctgtaataataataataataacagcaataattgtaacaataattaaaacaaaaatagtagtttatataagtagtaatataataagaagacctcccaaatccaggaaacctgaagagagtaacagttgtttttttcaacttagttatttgtaataaagaactaagaactaacaaagaactaagaactaacaaagaactaagaaccactaaactcaacttagttctttgtagtaaagaaataagaaccacttaattgcttagttttaatttttgttccaaactgtgagagggaagtggtctactgatccttatcccatggcattagagatcaaaaataattagcatatttttaaaaataaaatctctcaaagcaatattccttagcatatttcttccagtgttaagcaaataaacagggagtaatacaagcccagtttggggagatgccattttatcaaatagctatttgctctctgacctgcacagcagaagaaaaggtcagaagcaagaactaatgaagatccagattttggtttttgttttttcaaaaattatcagaaatgcaattgagaaacaatgctaaactctaaaaatagtaaaactacaatcttagaaaaataatctgcccatattgtagagcagcaactcagagtacctgccaagcttctatgtaagcatacagacgtgctgtattttattttcattatcacaatagtctttatattcaggaattacaagacaatgcatgcctttgcctgacaagacacatttttcaaagtactcaccttctagacaatacttaaacattgacaggtattacacaagagagagccttaaatttatttttctttttagttatgtaatattatctttattttatcactgaataaaattaggaaaaagctacaaggacatttgtattaagttatttaaattaataatatgtctaaaagggaaagaaaaatgaagataaaactacaatttccagaaacaaaagaaatgatacacaaaagaggttaggtgtctctgctttcaagtaaggtaaacttgagtttgaaacttgtgtcatccacttactaggtgtgggactttaggaatgtcaccttacttttctgaggttcaatttactcattaaaaaaaggcaatgatacctattgtatagagtcttgatgatttaatgagatagtataggtaaacatattcccaccagtgtttaatcaatgatagctgtcacgattaaacagaaaattattcctgtagatataatggagcctagagctgaatgttacagttgtacaaaaagagcatctattaaaatttcactctgattttatgtagagatattatcttgactttagtgggcctgcttattggttgaattccagtgcccattttctgctacataaacagaaaaaagccatccaaagtatggtctccagtataacagcatcagcatcacttgggaacttgttagaaatggaaattctagggctctatctcagatctattgaattagaaaccctgggggttgtaatctagtgatttgggttttaatgattctgtaagtgattctgatataggctaacattcaggagacaataatctaagtagacttcgacgggttaaaatccgtactctagctgaggtgaattttataaataaaatgaaccattactccctgaaataaattagaaataaaaggcaacaagtgattatttaggaaagatcaaaagttttttgtatgcaagaggcttagaggtgtgtgggtgtattggataggaacaatggaaactcctcacaagatattattaggttataccaaacatatgctaagtagtcctatcaatatggagcctaagtgattccagtgtggtttggactcaaattccatgacataacaatctttagaaagagaatttattaggtatctacagttaaaacactaatcctaaaaaatgtgtgaatctcatcaactgtacctgtaacaggtaaatctaagattattcctagaaactatacaggtcagaaataatagtaaattaaaagttgttcaccttgatgttggaatgaaagaatcaggacagaaagtaatattctaagagtaaagaaaaaaaggggtgtcagggtgtgaaaattataaaagctcagatatataaagcattctagataaggaaagaaccaatgccataagtgactgggttcaaatgttcaaataatagtttaatgtgtaactaatcatcttaaccaaattccttactagattatgtgggtaaacaacaccaaacatcattactgcaaatgccctttgttagtatatcctgctcctcttaatctacttgcttccgcccactcactcacattacataccagtggtgggggtcctgtgtgtttgcctcttattttctatctcattgggtatatctgcctgctctcaccatttcttgtaggtgagaagtcacataccaaacaacttgtagaaaggcctatttttaacaaatatgttccataagggattgtaatacctttctttaaaaaataaaataaaataaaggtacacattctcactaatgagatcacctccaagaattattatgttgtatcacattcttgtgttcatccactaatgggaattgatccccttaacaattttgtctctcttaattaaaattaactgaaagggaaaaaaacatagtttccttatgttttacagaggcattatgccaaaatatcaaataaagaaatatactaataacattaaaaatgaactcaacaacaccttccattactaaccttatcctctagtattactgaaatacagtttaaatttcacctaacatttcatggaaacacatgctgcacagaggaaaaaaatgtattttcaaatataaaatttccatgtacttaagtaattgctaaatataacgacattattttggctgagaataaatgattcataatcacctgggggacaggaattcaaatttctttcttcttctctcatataaaacatcctcatcctcataaatctaaaattttcaaaatggcccaaactgtgttcagtattacaggagaggcagcaacacatgcagagccacaaaattcatgataatgtgattaaattacatttatggaggaagaatttgctcaaataatctgaggtgttgaagtgaaaattatctaaaatgaaagtggcaatcaaaaagtactcctacagatcttggtctgatagagagcacaaaagaaaagaagatacttcagtgcatttctgatataggaatattagcctggggtgatacaagaaacttgtttttgctaaaacagactgaaaatatacaggatacagtgtttctgccaggtacacaccaactgaatagtgctttgagaatggggtatctgaacttttttcttttgttatatgctattggatatagatttacttatttttattttactttttttttaatttcagtagctttaggtgtacaagtggttttcggttacatggatgaactatatagtcgtgaagtctaacatttcagtgaacctgtcactcaagtcttgtacgttgtacccaataggtgttttttcatcattcaatccccttcccacgattccagcttgtgagcctccaatgtcccttataccatgctgtatgcttttgtgcacccatagtgcagctcccacttataagtgagtaacatgaagcatttggttttccattcctgagtcacttcacttagaatattggcctccagttccatccaagttgctacaaaagacattattttgttctttctatggctaagtagtattctgtggaatatacataccacattttctttatccactcattggcttttgggcacttaggtagattccatatatctgtaattatgcattgcgcagtgataaatatatgtttgcagatgtctttctgacatagtgacttctctcactatccttcacaaactaatgcaggaacagaaaaccaaatactgcctgttctcacctataaatgagagctaaatgaagagaacacatgaacacatagaggggatcaacagacactggggcctactggagggtggagagtgtgaggatggagaggatcaggaaaaataactaatgcgtactaggcttaatacttgagtggcaaaatcatctgtacaaaaaacccctatgacacaagttgacctacataacaaacttgcacatgtaccccctggacttaaaattaaaacaaaaagaatgtagatttttaaaaaatgggcacaagttgattaatactcggtggagcagtatttgtttaatgctataaagcaagcatcgtagaactgattaacaaactaatcaaatgtactacatagctcaaaaacaaaaacaaaaacaaaaacaaaagcaaaaacaggcaaaaaaaccaagatccatagatatacctcccattttacattgggcattaatgtaggcttgcaaacagtacagaaaatttaaggtttatgagataaaaaattaaaaacttgaataaggatgtctaagcccaaattgggtatttgaccagttatcagaattttgctggacagtgagattcactctcagttagacaggtggaattagaattatttagagcatgatgacaaaaatctaataccttcacatcctctctcgatctgtccgttgcagaaaagagcatcggagatgaggtccggaagccgtccatttaaatcaactgatgccaggcagccttgaaagccttctttggcatgtacaagttttggtaaggatttgtatgtttctttagctactcctcctatatataagtcacctgcaagaagatcaaagtctttgttacaaaagtaccatgtcattgactttaaacacacagtaggatggagaaaaaacagggaggtttatttttcattaagttaataaaaaattaatttatgactagctgttttccccaaagtgctaaacaatagagacgtttgaataatatactggcactaggagacatttctaaaagctatttccatagacaactaaagtaattccatattatgtggtcaaattgaaggaatgtgggctagctatagagatgcatacccttgcgtggaaatccaggcctggttatttgcaagccctacagccttgtgtgtgtgtgtgtgtgtgtgtgtgtgtgtgtgtatatatatatataagtttctctgattattagtatcattgtttctaaaatgggaacaataaaaacctatgccagagggtttcatgatgattaaatgagatgaaatatatcaagcatccacaagagcaaaagtataaagtggacacacagtcaacaggcattattattaaattcaccttctgcttagagatctctgtgtcttccatttcatcagaagttcagtaaatttcttcttgtatctaaagtcacttctatactaggctgaagcccactatccttgcttgcacctctcttgttcgataattcacataatagtctgtacataagtggatattgcatccttcttgaggtatttctgtttttaggtaaaattacactactttcaatttttaggctgctctgaaatccgttaacaaattttcaacttatttttctaattttattgcagtttctaatggaagacattgcttagctttgtttaactttttctctctaggtttgagattccccaactttatggactattacttaaaaaaaaaaagagattacaatctatgttggattctgtttctttttctatttcagattatttaccatatctggataatattcaataaacataactaagtgactttagtaaacatttaatcaatgtggaacataaggaaggtgagctcaaaattcagtaatatgctgctatagctccagtctacaagttctgtaacatactctttttatctacttcttcaactttcattttcatttgaactttctttctcatgttaaccattctattcaacttgatgtcacttggcacattttccccagtgtaacacaaaaatcctgcaatcttactgttcacctgggtccttctgtgttgtcttcacgagacttgggaacaaggagaactgatacacagactgttgagctgtgagtaacaaattccttggtctcccatccagaaatattctgtcttctgcaggcacccattaaacagtaataagctaacctattaatttgtatgtagggtaaaatcaaaccacagatataacactcttgaactgtactcatgaataaattgaaatagaggaatcatgtggcatactcaaagtcattcaacgttaaaaactgagaacttaggtccttgacctaactaaaacttaagttttataactatataatttgcattgaaagtactggatgtatttacttccccccttttacataaagcaaagtctactgactattaaccatcattcttaatattaaaagacagcatggttttggtcagagaggggatactattttgaagaattatttgatttttcttccatatttccattctgtcctttgtttttgctctcacttaaatttcaggccattgtgttttagttgcctcagagaaaggatatgaatcagaaatcaaagatacaaaattagctttctgtatttaagtctaaaaatcctagactcttcgaggaatgaaatagaatacattggagtttacataagaaaagtaaagctttcctactcctctttcagtcaagcaggagataaagttggaagaacctagttgtgcaagtacagtcattggcaaatgtcaaagagggtgctgatttctaatttaaggactgagctctggtgaatctcaaaacctcaggtaagtttcaaggagtaatgcaaacctctgtgcatttcctcaggagaactaagagggagcagtgagagctctgaaaagaaatggctgcatggtggacttagataacctgagaccttagacagtctcacacaacgttccgtactcctctgtgccatgggagctatagaacaatttccagactggcacagaaatagcaaaaaaaaaaaaaaaaaaaaaaagtccaacctaaagaggtcatgcacacaagaatgaagatgctgggtagcacctcagtgagcacctgagttgtgactctagaatatttgaaacaagcttccatgccacctctctttacccgcccgcccccctaccaaaaaaaaaaaaatgagtacagtagaactcaccccattgagttatttagatatgacacaagaaaaagaagggaactaaaattgcctgagattgtaccttcactaactcaaagaatcaaagctcaaaatagaaaccaaggtgagttatagaaaaatagaaaagttacatttcttgtacatcagagattgtgggctgagatttataatttgacatgacaaatagcaatgaaaggaaatactacctactcctttcatttgttgaacaaaatttgttagaaaatttcagctctcctccaggactaatgaatgtagtagagtggggaattgaatgaagaattcttggcacagctttaggcttttcagatgtagaactcagtaatagaaattatgtatagaatactatatatttattaatcaatcttcctctgtctgactgtaacctcctgaaggagagagactgtgtttcccagagtgcccggtactgggctctaagcacggttggccctcaataaatattgtcagccaccttatggattgaggccacggtagaaaagaataaaaaaagaggaaacagtaaggcaacacatgaggagagtgctaattctaaaatgcaccaacttacttccttttcccacttcctaccacaatccctatgtttttctattaaaaaacttacttgcctgacaacattgtaaagcttattgaagagaactagtaatctttcccttgagttactaaagagcagaaaatatcagttcaagcagtgtgggatacaaccttcaaacatagcaaggtagacgaggttggctttataaataggggactcattctcattttcattactgaagctgtacttagcaccaccacttagtactgtttataaactctttgatatagcaaatagtgatctaaagtcccttggtgggttgccacatgaagagaacaaagaaactcctttagtggtctgagccctgtgtactattatcactttatcaaagatgcaggttctctttttgatccttgaagtgacgggtttaaaaaaaaaaaatgacccattagcactaatgggtcctgcaggtgagtccctgtgcatgtgaaggaggatatacttaatggctctgtgtatgaacaagagcctgcatgggcaaccagtaaaagccaactttcctgtagatatgaagctagcctgttacctcttcttcaaaatgagtggctgatttttaattcatatgttttaaggaccatgtaggcaattgataaggcaaaggttgaattgggacactttcagcaaaagaagtagagaacatgtacaataccaaaaactcaaaagtctaaggggtgagtttcttaaaataatctcaataatacccttatttttagtactgtatatacacagccactatgttcctctcaagagtgttatctgtgaatgaactggggtgatatcatgagtatccattccgcagtaattgagcagtaatgactagggaatagggcacaggcattttggttttctctgtctacaaaccctggctctgccacctactggctgtctcagtgtaggcaagttaggttacataacttctttaagagtcagattcttcatctatgaaatggggttgataatgcctaccttgcaaggccataaggattacaaagtatgcacataaagcatctagtatacagcatggacttagcccgtcattgatactggtatggctgtcagtatatctgtaaggatgacacatctatgatgtacctcaatctatgctgattccactgagaaatgcagaagaaggagaagtatagtttatctcctgtttctagcacaactggagtgacaacatgtcaattttataaattctccatgatattttttctattggatttagttgacagtcatttgtgtgctgaagtgtgccttacactattctaaaagtagctcacagagctcctttgacttaatttgaaattcggtggcattgaatctggtaatataaataggaaagttgcttgacaaatatcttctaatttgacacaaagcgattaagaggacaaaaaaactctatgaagcccaagggccaggttgtcagttccagactaaacatgccttagaaaatcagagaaataacaggtttttgtggactgtggttgcaaagtgggggagcatacaaaagttgagacaagaagaaagtatgggagacattactattgtaatgatataaatgtggatgccagacacagggaacagcacaattgtaccatggagacaaaatttatatggcatttaggaaagagaataaaaggcttgactggaagagaggagttttcagttatttattaagttatgtaaataatattgtataagtaaagtcaaaggaaaggccaccatagaacttatgactgctggctgaaaaaaataaataattaaagataatgagaaatccaaggatcaaagcaaagcaggctaggaaactagggaatttgaagcagtaataatccggaggagaaataaaattgcatttaacgtcatgtatgtggaatttgagtaggaacatcctagaggaatccagtgatatgaacctgggccttagggaacggaggttggagcttagaggccttccttgggagccaccaaccaaaagcagacaaatgacgcggtagagatttcctcttcacttaaaataggaagcataaggcaattagagtaaagaccaagctctgccttacagtagcagaatgcaagtgtcaaggtataattagttctttgactcagctttcctgtttattcacatgtacttttttgaacctcttaaatatctcactttcattttaatttttttaaaaagcatacagaaaaaggacaattgccttatagatttgaatagctaaaactccaggaaatatgaaggaagctctcacaaacttttataaatggcatttggggaaaaagaaaaagtgaagtcacacaaattagcttactttcctatagctggactagagaaagtgcaattctagacacttcattttaagaagattggaccttggagagaaaatttgggtgcagctttttctcctaattcttattgtgattggatggtaaaagtagtgcaatcaagcttgggtagtttctgagcacattctatgggaagggtgcctttcggggaacaatcaacctctgtccccaaatttgtaccattatctttaattttaatattgtattgcacacacataaaggaatatctgtaggtcagaccttatctagatacactgagagagcttgtctttaggtgacaaatccaaacctctaaaacaggtgttccctgttagataaaagaaaatgacctataatatctgataaacaaacatttgtttgctttcttagtagaaagcctaagtgtgactgcttaaataaataatattaaactactaaaagaaaaagcatgggaagtgaatactgctctaatctatttgagcttacaagtaaacaaatataaacttctataagaaaccacacagaaatgaacaatgaaaactatacaagatcatttctaagttcaaggcttgtaaaatattcaaaatggaaatcaaatgggcaattcaagcagacattttgctctgagacacaagatctgtgtctgtaataaatctccattttttaaaagattaattttagaaactctccgctgaagagatgttaagtggtcaccagcttgatttattgttttttaacttctatacatcttagtctcccttggtacataaaaggtttagccttacaacaatctatttttgcttctgtaggaaataaccataaattattatctttaggcgtgtcctgaatttctaggtccagcctaaaatcaaaccttcatcatctcccttgctgtgaaattactttttctaaactttcatgttgtgtaacagccacatatctagtctacctgctctccagattggaaattcagtatcatttttaactttattttatatctcacaccttacaatcaactactgccaaggggtgaatgactcaactttgccaatatttctgacatttgttgtttcgttttcattcccatttccagttcttatctatttttcttcttgtacacaccttttaagtactaacctgttacctggtgtcactgtctccattcagcctcctcatcaacactgtctcagtcactccactgtgttctgatatcttcaatacctttctgtatcatctaaattaagtctaaggctcagcagtgatcaagattttgaattacttctcttcaaaaacttttgctaaactttgaactatctttcaaaaataacttttgccaggtagaagattgaaataatatctatcttcgccccacagtccgacctttagtcaaactttgttggcagcctttccccaactctgcattttcccactgctccatccttgcttgtggtatacaatacttccagcatgaatgcctttcctcttctgatgttgttcttcaaaatcctactcaacttgggggactcaactcaaactccaccttggaaatgtgtacctgtttccttagccacagataaatatcttggaatcctcataaaaaattgaaccccttttctgaaaatgattttatctttttcagttctttgtatgtgtaagccttatgtaaccattagtttatacattatttgaaggaataatcctaaacacgtttatattctcattttcacttagtaagcatttgataattagttgttgactcactgaatgaatggatgaattagtagttcacattcaataaataatcattgaaacaataaggacacagggaaggttttatgtcagcactcatatttgtccctggctctttttacctgagcaataatgaattaagttaattgtggaaaatttttcatctactaatccatttctttttcttttttttttttttttttttttttgagatggagtcttgctccgttgcccaggctggagtgcagtggcacaatcttggctcactgcaacctccgcctcctgggttcaagcaattctcctgcctcagcctccagagtagctgggattacaggtctatgccattacacccggctaacttctgtatttttagtagagattgggtttcaccgcgttggccaggctagtctcaaactcctgacctcagatatccgcccgccttggcctcccaaagtgctgggattacaggcgtaagccaccatgcccggcctgatccctttcttaaacacaaaggtgaagccatccagctcattaagaaaatttagggaattcaatggcatattttttcccactctgatagtgtaacttgatagagtaatacatgaccagttttaactgacacatactgaatttatttgtagaaagagatacagagatgaagatagaggtgtagaaacagtttggagtatcagtgtgcgtagtaatgagaacccatgcatgaatcgtcttctccaattaaaatatgtacaaaaatctttggaggaaattaaatttgagcctatcctggccttctgtttcattctggctctatgctgctccatatacaaagatgacctgattcatgcatcctccataggcatatggacaccatgagcacttcacactgtctctccagactcatctgctctgttattatcacaaagaaagacatgcatttatttgctgtgtgtgtctgtagaacacagagaagctaactgtgtggacccttagtgctctgctctagtgagtttgttaatcctcatctgcacttccttttggtttgcagatgtttcactccttctagcctttgggccaccactcaaagactcctaaggttagagtccttctagtttgtagcttctatttcttggctccttgtcagccacaggtgttcctgatgctacagcaggcttacacatctaacagtatattgctttagctaaaatgactttgagtttcacaaaaatcaccgagacaactgaactgaaatgtacagagtcctgagtgagagaggtcttccttactgctttgaatctttggtaatcagtgtcaggcattactatggtcaaaaccagaaaaaacagctctgacttcatcattataataataactgacatgagttaagtatccttaacttgaccaagcatttgcacatatattgttatatctggtttttgcctgttgagctacaagaggagtaaaggttatcagggatacatgttacagatgaagaaactatggtttagggctacaataccagaacagggcagggtcttattgcaagcccaggtcttctgaaactatgttaattgtccgttaatccagactgacacgcacatgtacaccctgtacactctaagtggcaagtggccaatatgtacagcttcactactacaacatacaggaaattttggagagttgtggctagttgataaaagtaatggtaataaatggtagcaaaaatccaagcaagctaacaaattcctgagacaactggtacaataagagactcatctgcataataatggagtaatctcataaaggcaaagtcaattttcttccataattataaatattaggtattcaaattctgatacataagtagaattcttatgttcaaaactttttaaatcaaattttatcaaaatgttttttaccaaaagtcaacatttgatttttagatacagcagttacttttcaattgtctcccacaaagagataaatcagacacttgtatgtatccatggcccaatctagtacaaaccagcacttacgtgggacaagttggggaggggcaaccccaagaagataagagtttagaccttaacgttttcctgtagtgagttttggggagttaatattgttattatccatatcaacagaacatataattctttcaatattctgaacttttgtttctttttttttttttttttttttttgagacggagtctcgctctgtcgcccaggctggagtgcagtggcgggatctcggctcactgcaagctccgcctcccgggttcacgctattctcctgcctcagcctcccaagtagctgggactacaggcgcccgccactacgcccggctaatttttttttgtatttttagtagagacggggtttcaccgttttagccgggatggtctcgatctcctgacctcgtgatccgcccgcctcggcctcccaaagtgctgggattacaggcgtgagccaccgcgcccggccgaacttttgtttcttatttaaattttgaaacaaaactgcccccaaaaagatttttttaaagtatgattctgaaacttacaacaggaagacagattttgtttgtatgtttggccaacagactgtgaggaaacctggtgggcatgctaaatgggaaataataaagtgaaattgctatgggagcgtgtagagtaatccatcttcttttaaacccactctatgccagtaacagtgtggcagatggggtgcgagttcagggatataaatccatgccaagctaacttcatctaatggctttaaatttttaaatttacctttaggtaaaaattgggtacaaacagtttcagttttttccttttgtctcatccaaatgacagccagtttaaatacctgtgacattccttacagcagacaattctgtcaccattccatgtttcattttttttacttactgtgtaatgctctctgggactgcatatggatttgcaggggttttcaacctcacatatactgctgtaccttacacatgcataaacagtgcagtttgaaaggtgcttttttcagaagcttttgaaccagagtgactccatcttgaataggggctgggtaaaataagactgagacctactgggctgggctgcattcccgaaaggttagatgttcttagtaacatatgagataggaggtccacataagatacaggtcacaaagaccttgctgataaaacagaatgcaataaagaatctggccaacaggcgcggtggctcaggcctataatcccagcactttgggaggctgtggcgggaagaaaccccaactctactaaaaatacaaaaattagctgtgcgtggtggcatgcgtctgtagtcccagctatttgggaggctgaggcaggagaatcgcttgaacccgggaggcagtggttgcagtgagccaagatcgcgcccatgcactccagcctgggcgacagggagagactccgtgtcaaaaaaaaaaaaaaaaaaaaaaaggaatctggccaccaaaaccaagatggcaatgaaagtcacctctggtcatgctcactgctcactatatgctaattataatttattagcttgctaaaagacactcccaccagtgccatgacagtttacaaatgccatgtcaacgtcaggatcagaaagttaccctatatggcttaaaaaggggaggaaccctcagttctgggaatttcccactcattttctggaaaactcatgaataatccaccccttgtttagcatataataaagaaaaaactataagtatactcagttcagcagtccatgacgctgttctgcctataaagtaggcatttgtttgtttctttacttctctaataaacttgccttcactttactctatggacttgccccaagttctttcttgcacaaggttcaagaaccctctcttgggttccggttcagggcccctttctcgtaacactttcacatctcttactccatttgatccttgttgcaacccttcacaataggtagggtggttattattatccctacctgacagatgaacaaactacccttctgaaaagtttagttacctgcccagggtaatacaagcaatacaagaataataatgccagcacttcagcgtttgactcccaggctaattcttttctgatgcaccacactctctcctatttttactaaaacccttctcaatgacaggagtagaatagatagaggagtttagaaatgactgttctggaaattaaaagagactgataaatagggaacaagtagcagaacttatgtaaagctgttattttttcccgaatagtgtatagaacaattagactttctttcccaaaataacttttcttatttgaaagacaggtttttttcttatttcaaaacaaacgaacatttattttgggtggggaagacccagtggtataaagggcaaatataaaagaacagctctttcctataatacgtctctttaatgtaggtgaaaaattggcaccggctctcaacttagatataaacaggataaaaaaggttatagccaccagtggttttctgtgtagcttgaaaggacaaagtagtataaagcacacacaaaaaaacttacagacattgccaaagagctttcaaaatattatgagcttcctggagtcaaatcacactcttgtttttccttaagtatctgaacatttctgtatttttttttccaaaaaagaattccttctgtgctcgaaagatggaatattattaataccaataaggtcatcacatccagttgctatagtgtaatttcctagtgcatgtctccaaacactttgttcttccaacataagctattcttaaggagaaatggagatacttaaaagcagggatccctcctccaggtcagggaagtgttaggaacttttcctaaaggctaaggaaattaagggctttgagagctgaatgagcctgcaagtagccagtttgcaccagccgatgactgattgataggccaacccccaatcacccaaccaagtactagattttccagagcctattctacatacctataaatgcaaatgttctgcagaatatatataaaggacacacagcaattaaagttgttagctgtattgtttgaggagaacttcaggggctaagaagacagaaccaatatatagatgctatgcaaggcattggggagagaagagcatatagaaagtaaagtggaaatatccagttcctttgcaactaccagaagtggaattttcaatgttatacaatgtagtagaaaagtagaagcttgattaagattttttatggaatagaaagtgttttattttatgatatttccccccaagattaaaataaatgttagcttttcactgtagacattcagaagtaatcctttcaaatattttggcaaatacagatggcagtatttaaatactgccgtagacctgggttcaaattctgtttctattgctttgtgctacgtgacaaatgaataactcacttaagccttccaagtctccattatctcatctgtaaaatgggggcactaataattcactgatctaattgttgtgaggattcagagaccgtatgtgtaaaataaatactaaaattgaatttctgactgaagtgccaacacagtcaatatcagacaatgtgagaatgagacagacatccagattcaaaatttatcaaggaacaggtgaaatactggttctaaggcccttgaacccctcagctacattaaggaaataataaaaataaaatggatcagaaatgggaaggaaaggtgtctgagaatattttttgaagtagctcgtactatgcagtgagtttgtgctcctacattctagctccaagcctagcaaggcagctctcagaggagggtctcctggagtgcttgctttgcgttcccgaccactggaggatgcagaactggcacccgacacgctgagaaaactttaaagaggtcaagatggaatggaacggaaatgagagcattgggaatggggtacacttccaaggttgaggggacaaaggatccatggaaactcctcgtgggccgagataggccccaagtgcatgacagcaagctgggcaggactgcctagagacaggtcagcccatgtggtaagagtctgtgaggagggagcagaagcatccccctacacagggattaaggttggaagttctagcagaaaagccttggatgaacccaagaatgcaccaggagaggaggaattcgagggatctgccagaccaagagtcccaacatcagttgatgtgccttgtcaaaaagctgtcgaaagataattgcaggaaaaggcagtagccgaacttgccctttgccctactgccagtgactgaccaaagcagagggcagcctcaattctgagctttgattagtaactcagattggtggtttgtaattttaatgaatgttatgttttataatataaaattattatataattaccttaacagtgaacccaaacatttactctaaatcagtacgtggtacaaaaccttaacacaatacattttaaagtgatcggttgcggtaaaaccaaaaaatgatattatagcttgaccacattaggacatcatacttatttaatgtaatgctttcacacataagcccttaacatgatgcatgacatataggcatgcataaatgacataattgataataacgaggatgatggtgacaataacgaaggtaatttattatatctttgaacagagaatacagacagacccaagccataagatagtttttctcacgaaaacactcagttttctacaataccactctattgatgtgcatgattcacacatgtcgcagccaaaagacatttaatgtcattttggatatcattttgggaaactgagttcattgggtttcacaaaaaatatcgggaactacacatgttaaatttttaactgtcaaagggctgttgtgttagagaaagaatggtacactagtacaggcccttatagtgtttgaattctttttacagtcccagaactctaaggggaagccagtggtgagaggcctaaggagtctgtgtattgtgggtaggggagtgtgagtggggcatgaggaggggagagggaggagagaacttcccacagacaggttaggaatattgataactaacatcatactagtcaacctctaataaacttgagatggcaaatgggctctgcttgtactagggtagttatgggaaattggcctaaatattgccaacacctgtcagatccaaatgagccttatgagccctcctagtcctttttatgaacccttgagcatcaaagaatacactggcaaaccttgtgtattgttctgggaattaattgagatgagataccatgtgcaaatctttataacagtacatgagatacgacgaacccttagaaatggttacaataatttctatttagtattactatcattattgttctggtgagatgcttaacctccccaagcctcatgttagtttcatcacctgttacatggtgataagaacagcaacttcatcagtttgtcacaaaaattaaagagaaaatatatgtagctgtcttacctaatgcctagtaaaggtagatgaggatgatggtgatgatgatggtgatagtgatataccctgcctaaggaaatacacaaaagaaatggcagagatgctatttcacccaggtctttctgacgtcaaagactgtattattaattataatgctatatgcttcttgtattgtccttacgaacaaccaaaataattaattgcaaaggccaaaaaggggccacttttaagaatggacacagaaaaccacattcatgtgatgtcaatgggggacgctgattgacctaatgtggttcctaaggagcactggaagtaccctctagtgcatgaaaataaagagccacaacagtgctatgtcattaaaaatgcactttcctgtgtggataaagatggcagatttagcttttgagcatttctaccgtgggagcagcaactttgttttaagcccacccaactttcaagtctatttccatgttgacccatggctcaagaggaattgtacagtacccgggatggaagctggctttcttctggcggggactgtgttattactgaaatccaactagatgagacaattgcctgaaaatgatagtgacattcccttttgggaatatagtaaacaactgtaacattgcccagatgtcagcctgggcccctttgtccattacagatctagatgagtctggttaggaccctcgcatctgcacagaaggtaaaaatctaaggtcctccttcttctggcatttcctgtgaattcctgggaacctctgactattgcttggctttgctacctcatgtactccctatgtataaacaaagtctctgtctccacccaaaaacaaatgctgctcactcaagcacttatgagtttcatcatctaaacatttgggtatcacctagcacctagtattctatcaccttgaagaatttaggccctatcctcaccccctactccagagcaaggcaaaccctgtccctgaattcttgcatagcaggttaaaaatcacactttttgagcctttgatatcttcatttataacccaagtagcctatccccatatttctttaaacaaatccagtaaactcatatttgtataatgtgactctgtctcttattccctcaacctggcacagggaggacatctgtcttgatcaaatgtactcttccaagaatttggcactagaactgctaaacttaaacgagtctttcttgggtgtttgagttgatcaggggtgaaaagccaggtctgagaaggccaagtttaccaatgcttgtgaaagcagagaaaactagtgtgcagagcaggagaggaacaagggaatgatccttgggcagcttttgggaggcagctcacagccccagtagagaccaagtgaggctgcaacactggcttattgctaagagctttcctgagtacgccttttatggagcccagcattgatctttctctgttcttgtccgtgggttcctgtaatgctacatcctgtctccctgtccctttccacatcacttgtcagtctgaatggttttatgctactgtactccaaagacttctgtataagtctcccttcagcaaaaggagggaggtctgagagctaggaaaaccctgaagatttaaatcttacttgaatgagagagatattgtcagatatctgccttctcagatggctgacaaagacagctcttgaacaagaagctcgaattctaagaagacaacgcatcaccactcctggcattccctaaagagggacctgcaccaaaggctcatctctggatgacgatgaggtcttgtgagcagtcacctgacctttgagaactcagctctgagcacctgcaggtacttgctgctccaaggcacaaatgtcaccaccttgaagagctcaagccatctaatcaccatcctgctgggacgtggtaaactgtcagcttatcatgaaaggcatctgggcataggattgaactttccagtagcccacacttggcgtggaaaagctgaagaaagctatttctccctgtgcacaacctccttgtggctgttccaagcatggaagccaaggcctgtggctgtcagagttcagctagtgtgctgggtgagaagaaaccagccccagggctttatgcatctgcaaatgggatgggttgggatctttaaagtttcaccaaaagcagagtcaataggtggcactctcgctaccaatctccatcttgggcctgtgactgaacacaccaataatcttcaccaatgaatccacacaaaggtgcagatttcttttcagtgtgttgctgcaggttgtcactagcagtcaattgagattgatatgagcaacgcaacttctatcttctgagctatggtaaagaaatgtgaaactgggatagctgtgcaggtcaacctcccctgagcagatttctctcatctgtaaaaggaattggtcacaccagacaatccccaagatcacttatacttcctaagttcacgtgattctaatggtgggaagagagatttcaaataatatagttggagggagttgataaaactaaatatagacaacccatggttaatgtcagaaaaattcagaaacaagtaaaatgggtgaaggaatttttaaaaaatgcttttagtagagaataaagaatttacactctgctgaaatactgtgagctgggccaagaaccacagggaagcagagggaagaactcccaaaccaaatgttggatagcaggtcccagataactgcatgggaagggaatgttttaatcccactctcaacttcccgcctccttaaggtaggattaaaacacactgacaaaggctttacagtacggagaacagattgagacaaattctgcaaaacccggggattcaatggatgtggcagaagagaaacagtttcacatctctgtctgtctttcaagtaactgctctaaaattcttgtgtaaggaaaggagtaacaatatatcaagtcttatttctacatactcagaaacttattgtctttgttctgtaccatggcaattgcctcaaaagtggtgtcttttccctgaacctcggctcatccatcccattgaagccaaaggaataattctaatgagcattgtgaactctcctctgcttctcaaaaccctttaatttcacctttcccatcttctggcatggcgttcagggcccttcaaaatgagaaaattaccctgctcttttgtcaggggttacagacggccttccaacccatagtctccttctcttccctttcaagttcaaaaagctacctctgtgtaattgtgtaattggactaaagaagtgagcctagccagtagcagcaggggaaaagcttatgaagttatagcctagacccaggtccacacactgtattaaaccctgtactggggggaattggaaagtgagatgaagcagtgaatggacagaagtggaaacatacacaggaataaaagccataggtgtaagccacgagacagaagaagccaagattggaagaagccagcaggcagagaggagccatctcacagcagtgccagcagacagaatagagcgagggtggctgcactgctgtcacggtggggcaatggattagggagcagtgaacatgtgtatccgagggaaaaaccaagaggatggctcttgagatcccagtatgactccaagaacaaagttcttatactctgtgaggcctcattgctcaacagctgaaagggtttcttgtctgtcttacttcctactggatccttaaaataatctacaaatggaaatagtgttaataaatctctttcccttatatagactaaaaaaaaaagtaacctcaaacagcaacaacaagaaactaataaagatggcctaaccacaggacagcaggaccttccctccacttccggtgccatatcctgctctaacgttaagctcaacatcactcttccctgaatattttctatttaaacaaagtatctgggcaagacaagtgggctgtcagatgtcctgtgggctgaatgtacaaagcctgggcatgtttaaatgtgattatgactttgaatagaatctggtttactgaatgacagcagtaaagatttgtcaagtagcaacatgaaaaggtataaaatggaggggatatgtgttatattcaggattggagagggcagggagctgagtaatagcaactggtcagagatcaagaagaaaagagcaagaatactatttatcttcaaactttgcttagaggttgagtatatttgaaaagaaagtccctgttgagttgtttctgattagggacatttaagtggcttcgtagcaggatgaacaatagcaggcagttgccttcagggtgagatttaaggaggaatactaggaaggttgaggaggagataaatgggtgatgatcctggtaagaaggaaaaggggcaagatcagaagacaatgaagacaatgccagagctcaaaatccttgaaggagttttgggtttgagagggagaacagaggaggaagaaaggacaaagtactgcctgggctgacctagatgtggcccataaataaatcactgtactcagttttatgtagttttgctaggtggccacctgagggcactctatgctacacagctaggaatctttaattttccccctatcaagtaaactatatatatcctcaatttgctgaaggataaacttagctaatgctttaaagaagggtactcattgaaggtgggggccaaaagcaattcttcctccctattttttccctcaactagattaataaatgagcaagactgacctcaatttaaatccctgggtaattgcaaggattaaatacagtaacttcagttaaatctatttagcatttagtaggcacttaataaatattagctccctcccatatatatgcacatcctaacatacaaatttgccaaatacaggaacaagagaaggaacacaaggaggaatcgcaccaaccatttatctctctaaagaaggcagggctcagaagtcctaaaatgaatacaaagctaggctaggaaatcattccagagagcaaatttctgctgctcctttcattgcatgttgctgcttgtacataataaccagagggaatagaacacaaacagctgggaaataaagatgaaagcaaaactgtatcagcaggaagagacacacaaccccctgagaatcgagcggtgtcatgagagataagctgaacaaggccagctgcatggaatttatcttctgagagaaagatcattagattcctacccatttctgatcgtttctattggagtcaaggtggagaatgaaatacatgagccccagttttcaaagttctacactaaagtcctgttcctataatgaaacagagccacggacaaaagaatgcatcactataaaagccaactgtggaattttagatgtctgaaaacaaaagaaattctacttccccttgcaaacggagcaggttgaggtttccccaactcccgggtcctatgcagcatgttttgtggccttctgctgccctctagtgtctttttaaggtatggtaaaacataaggaggataaaaaaaattctcctaataatcctaaccagccaacaatgtgacttcagcccagggctggtaaaacaaacaaaaaaacagtaacattctgaaataaaagcaaaaccaggatttatacaaaaatttaaaagtgagttaaatttggcctcaacatagatcttgcattatttcaggactctgaaataatggcatctctatcagtcaatgcactttaaaaagaaagatgcctgttttctgtgcatctctctcaaatgattactgccttggttggtctgagataggatccagaaatatgaacttcgcaaacaccacaacatgattctcaagtagctaaagttggctgaccttcttttgagaagcaccaaagatggctgcaatgactctcagcaggatggagagtaaatctgatgttttctttaattctttaagaatacaatctattgaccaaaacaggtcaactttcatttttcctgcagctcagtgctacatgattagtatgcaaagaaaatactgctgtccatgtctgagcgaagagttcatgtagaagttctcctttatgaataagtccctctaaattccagcaggcatccaggtggaaaaaagaaaaaaatgcctcgttgctcttgctcacccttcaaatatccctcaaacattactgctgcaaaaaagccttccaggtggtcccagcttggtttcaatgccccactacagctccacagcacctaaaagtgctgtccttctctgtcctataagtgctccctcaacgccagtgttctcatagagacggagagctttgcattgcagaaaccctgttgtcctctttccaaagtcaatgctccataaatactcatgctctggccaatgcccacagccacccttacccaaagtggtgatgatgggagacaagacacatcaggccccacagcaggctgttctcaaactccctctagctgatggtgcacatgataagaggcaccgtgggatgactgttgccatcggatcacatacccaatttgttagctcaaacttggactaattttagaaacttgctcttacttttctgcaatgcagaaggtattattctatactaatgattagccccttcacatgggaaattcacaaacaattttaattgtgctttttaaaaaaacacaagtacactgagagttcattactatatatcttaatactatgtaatatgccatttttaagttcatacttacagtgttttttctttattatgggcaaagcctgttttatcttcagagttatccatcacttaatgctttaataaaaataaactctgaagtacttaggtgtgtaagtacccccaccagaaagaatcctagtctacaatctcctattaccttcacttccatttgttaatgaaaaataagcagatatttacttctcaggagacagtgtcctaactatctgaagaaatacaatccattgtctcacacggcttctctggaccctcaatgtgtagggctgtacatgccacatacttcaaccaattataaactgctttttttttagccattttaatttccaacagagtatccctaatttccagtgaagttcacttatacttactgacgtctcacctacacaaacagggcactttttgctttagctttggtgactcgatcagcacactggattttacaatctctccctttcttttgacaattaccacctgagcccactgtgcaaaacagggggccatgaaaaatacagaagaaaaagctcttcaatcagagggaataaagagaaagaggtttggcctgtaagaagcagttctttgaatttcattttattttttgagccaagctattagatttgtgggtacaaataagatctctttgaagttagcaagaagcccactgtgaaagaagggagacggccattaccacacattttatatgttgagcaaataaagtcccaggattcaaaatatattctgcaattacagaaagcaaaacacttttctttctcctttcaccttgtttagaaagagcatttttctctagaaagagttctgttgaggctgggtgcagtggctcacacctgtaatcctagcattttgggaggctgaggcaggcggatcacctgaggtcaggagttcaagagcagcctgaccaacacggcaaaaacctgtctctactaaaacacaaaattagccgggcgtggtggcgggtgcctgtaatcccagctacttgggaggctgaggcaggagaattgcttgaacctaagaggcagagactgaagtgagccgagatcgtgccactgcactccagcctgggtgacggagcaagactctgtctccaaaaaaaaaaaaaaaaagagagttaaattttctctttccagtttcctaactcccctcctccgattttctacattgagaataacaggctaataatactttctggaatgcctgttgtagtgttaaattagatgggatacacacatatattcttagtgaatcacaaaatgtgattcaaatagaaacttcagtcatttctcttctattattgacatgttttctcagcattttgtcacgtgcatttgagaaatgaagtatcaataaggaagagaagcgtatgttaagactttcttagcagctggtgaaagaagcattccgtgtgtgtgtgtgtgtgtgtgtgtgtgtgtgtgtggtgtgtgtgtgtgtgtgtgtgtgtgtgtgtgtgtgtgtgttgggatgggggatagaattcactgttggagacacagggtttctaagccaggctcaaactcctgttggtcagggacttaggatccaggaaaccttaccaaggaaagaaaactaataagctctataataagctcctatatatctggttccctgactccaaatcaattgaaaactgttgggacttaagtaacttacaaatgcctttttaatatcaagaccaatattatatttttctcactttttacattttaatcatgcatgcttccttaggtgctgcattttttgagctgttattaaaaatacataggttcctaccacattaaaggggagcagaggcttgtgtgttgtattgttaattatgtgctgaaaatgaaattctggtcagtctttgcagaaggtacaaacacacccctaagcaaaggattttccatgtgaagggagaccgtgtggtgcaaggctcgttgctctgacttaacatgcacttactcttgaggtctaagttcctggctccggcggtgatttgcgttgtgatttttgtgtcaatctttacagtgtggaggttgctggtgtcccttgatatcatcacgttgtgccactgattgtcattgagaggtttatttgagcttcctttgatgaggttagcaccatttcccaaatcaaacacgtaatgtaagtacctgggaaaaaaatgaaagaggggaaagtgccatcactttttaaattttgatgaacctaaagtagatattacaaatggagattttttttcaggtggttccatccttactagaagtcatgacaataagttacatagaaactcagctatcaagaaggtaacaaacactattctgtttcagcaaagaggattattcagtgttttaactaaaggaaacagtgaaaattatttttaaaatcatggtctacatttaactttatgaatttggaaagcaatatctttcaccacgcgctccctgtttccacaattccctccatccttttctaacacttaaaatggccattcttctcgttcttgcacttgcttttctcctctatctcgattccctgtttgaggatagggaacgtgtactcatccttcaacatccaggtcagatagccactccctgctccacatgtttttctaatttacctgaagagtctcctgagcctttgaatgtgatcacctcaagaaacatgtcacagtgcttttcttttcttttctgtttatgtgttcatctacaaaccctaggattgtatgttggtgtgtgtgggtatgactcacagtggtagaaatctgagatgtgcatacgggtggcagaagtatatatatttatatccgtgcatggcacctgatgtagcatattgtaaatatacaccaatatttgcagaatgagtgaataaatgctgaaatcaattaaaatacattaaattttcctcacagttttaaggcacgtttacacaaatcttcctttctaaattctctaaggcactctgacatagaatgaagtttgagttaaaagggtttttttgaaatttaaacaatctgagtacttgaattagctatttaatttagcatagactatcctacaaacctgtatcaatgcttttgtggaattacattgtgcatagtcaggaaatgcccatttgaattgtaacattcatgaaatgcctaccataaattagagcccaatgtaatttgtatctcatatgtgaaaatgtaggtgcaaaaaactgtcctaaatccatattaatttaagatacctaagagatgatttaaacaaatgccttcttatttgtcctccacctgctccggcccaccaccttatgagccagtatgttcttcttagtgtatatttttggaaattgacgtccatttttccaaagttttatttatttgctattgaacaggcatgtactcaccctttaactaattcaaccacaataaagtcatttccatccccactgttatatagaattaatccatctagggatgttgtcttgaactggaaaaaaagatgcatagaagtgtaggcttgcaaggtagctaaggcaacatagctcgatttggtcttgaaggtgacaggatctgctatgatgttcctgaagccaaatctggcattaagctcacagtaatctatgtcgccatttttacacaggtcaatgtatgccattccattaaatgtcaagctctgcaggtgtccaatgaagttggaggggacagaagaaagataccgtcgttctgtgatgatgccagtctctatgttatggaactccagcctagtatgatcacctgccatttgacctaaaagagaagataatatatgattattttctgtatctgaaaggcactttcaactttaggctttcataacaatatcacattctaaaatacaaggagccaaatccctccttggtactcagttgcatataggaagaacacttaaatgatgccaaaaggtaagcctagattatataataaaacattcttaggccaggttataatccctgtccaaattttagtcttaacaaaaaatatcctcattaacaaaagtaatggtatcttttaaaggcgaaaaataaacaaattagcaagagagtgagcacatagtaaaagaaggagagggaggaaaaaaggaaagaagggagagtgcacagagagacgcattaggagcagtgactattctcagtcacccaactagaaagtgatacatctcagcctcatggataggtgatgttattccttataaatgttcttccaggaaaaaaaaatgtgactatatattttcctatacccagtagaaagagtggagagttgcagccctttcttccagtaatgaaacatgaaagtgtgtttgaagttaaatatacactattcactttccctcttcgtgctcaataatgaccatagtttttgttcatgctagtcttctaaatacattagaaatcctgttgatttcttcacctatgcctttttttgtccttaagttttctataactaaatcaagcaaaatacactaattgaaagcttgcccaattttgataataccagtaaaattggcccaccatgccccataccacaaggcaaaaatcttctttaaacatcctagggtgaagcttggatgcaaatttatttagcaactgactattccactcagtcctcatttctctctatccctgcatatttccctgtcaaacccattaatagcaaacttagtcccatctttatctccagagtgatcattttacctgtttgcaaggttgaaggtaagataaataagcaaagatgtgaacttgttttctaaatattaaaacacaacataaatataaggtacttgtatcagtaccagtgattcacacccaacatcttgctcttgtctaaataaactgtcagtcactctcttctgcaactaaaaatgctcatttattttgtaatcaagttcttccacgtgctagcttccctgcccgatttgccataattggaaaatgtttcaagttacctctttccatcatccacattattaatgaaaatattaattagagctaatcccagaatcagcccctgagaaaatgcattgaaccttttccccaggggtaatgaagactgaacaaccacctatgtgtgtcccctttggccagtttgacaaatttccatttctttagtcaagacagtaaaatattagacagtgtttaaggaaatatctgtaagtaaaatttagacgtcatgctttttgttgtgcaacaaaaactgtttatatgtttgcttaagtgactttgatgattatacatatatttgtacacaaaactcccctgaactgtacttaaccctatttcattttcaaacactcttttttagtcttgatcctggaaacaacattctactcatccttggcatgttctcttttcagccattggtttgttctgattcccttcctgcaaacatttttaaaacaaaaatgtcaccataaataattgtttcgtctctctctaccctcactaccatgcctcctgattgtctatctgatgcaaaagtactattacatccttgtcaattctggtttctcctgtgacatcatttctatcttctcccccagttcttcttgttcaatgacctcaatattgttctgtggggatctacttctttggtaaaaaataaaattaatccttaattatttccaaatataaagctctaaagacaccagcaacattgaattaagaagctaagtacaatgaagaatatgagaagcttaaaaatcgtctagatgcggtggctcacgcctgtaatcccagcattttgggaggcctaggggggcagatcacctgaggtcaggagtttgagaccagcctggccaacatggtgaaactctgtctctactaaaaatacaaaaattaactgggcgtggtggtgggcgcctgtaatcccagctactcgggaggctgaggcaggagaatcgcttgaacctgggaggcggaggttgcagtgagctgagattgcaccattgccctccagcctgggcaacagagcaagactccatctcaaaaaaaaaaaaaaaaaaagtcatatgggctttgatatccctttgggttgatttttattctatgccacattaaaatatgagccttaactcagtgacccctaccctgatcctgaaactgtcatgtttcatcttaaagtctctattgatgaaacaaccaatagtaaaaaaattctgaaaaaaatatttctaacacttgaaattaaatattacctccagttgtcaagttcttaccagctctaaaagaggaaagaccagttaattccagactaaggagttcagtaataaaaataagacagtatatctgttttcctctctcaaaggaatagaatatgcacacagagcataaataataaaaaggtagtacaacagcattgaagcaactatggcccagttacaagataaaaaaaaaatataattacagtgatggtagatatatttgttcactggggagaattagcccccaaaagccattatttgatgactaagaaaatattaactgattgttgccttctttaaaaaattattttttctcagaattttactccaatgtttaatcctcatcagtaatacagccacttctactactgtagatatttgttgattaaataagaaaaaattataagacttcgaaggggaaagatttttaatgttctaatgatttaaaaatgcaccatccaaggaaaatttggaataagcaaaatgcctctgatcacaatatttaaggtataacagattgacaataatctccaacaagacaacaaccaaaacatgtttcctagatgctgtgtttgtatagaaatctcaatatttccaagtcaaatatttttaccaaaatagatagcaaggttaatatgtgctctgcgttaggttacatttctcatgtcgagcaaaataaccctcccttacatccacttgttaattcacttaaaattgctgattgtgtggtatatgtgtccggtgctagccttggtattggagaaatagtgttgagaggggcagaaagggcccattttctccaaactcatggtctacgggagaaaggcagacaaaagaggttaaggttgtaattaaatctataataacaaaactcagagaaatgttatgaatttgatgaacgaggtattgtgttggtaaatgtgaaatggaagaagatgccaggtttgatatttaagctagatttgaagaattaaaaagagaaagccctgttaagaattggagaaagggaatcaagggtggattccaggaaggggagacggatgaaggaaggcttttggataacaaacagctacagagcatggctggagagctgggaacaagtaggttagtgacccacatgggattgaaaggagcgggagcgccagggtccagatttctcatagtgcttcttacattcagagctaaggaggatttgaagcaggggttaaccatgactcgtgtatgtgtgtgtgtgtgagtgtgtgtgtgtgtgtgtgtgtgtgtttattccctttgtgggtgcaagagattggagagtgaactagggcagttatagtagaaatgaaaatcatcaacaaaaagataatttcacagatataatttccaggatttactaatgatgagcagaatgaaggaagggaatgatgatgcctggctttcaggcttgggtaactggatatatggtgaatgttgttccataaaggacatacacacacagattaaaaaaaaaaaacacaattctagatttttacacagactggatgatgaattgaagcccagtgacttcccacttagggattccacaaaatttgtacaaccccttgtcatctatgacctaggaaatctccttccttgggcttctctgctggcaaatactatcctcacgatcctaggtgaggtgcaaacattcccaagaacagcttgagtatgtactgccctgtgttcaacagataactgacttaatagaattacgataaaacttaaagatatgggaaaatgtaggactttgcatgaagagtctctagtaccttccttgcagaaattcttctcattcagtgatttctgacttgctgtaaaatttaataagaaactcccattgcttctctgatttatgggtggcttcaagtggccactaggatatttgaaggaaatctcaatctaaagctttcattgccacatttggaagccttttatgtactacgtaaatcaagactgaattattcttatgaattgttggctttcatgagatctctgacaaaatagaagaagaaggaaggaagaaaggaagaaagaaaggaaagaaggaaggaaggaaggaaggaaggagggaaaaaataaacaatttacccaaggtatttaaaaaataactcagcatttgatgttaagtcttaggaaggaagaaatgagacaaacagtcgtaaagtaatcctgacttatttgttgccttcaactaagaaggcagaactactataactgccctagttcactctacaatctcttgcacccacaaagggaataaatacacacacacacgcatacccacacacactcagacacacaaacacacacacacacgagtcatggttaacccctgcttcaaatcctccttagctctgaatataagaagtggtacgggaaaagcaattttgaaactattttagatgcattattggattaagcaaatcaataaatgacattactgggagccaggattctcatcttggatgaaaacatatgaaagtatggaatgggaaaaataacgaaacaatgttgtaggtatgaaggtagcagtgtaaactcacactttataaaatgtgcattatgtgtatgtttatatgtacatataatgtatatgtctgtgtgtagatacatttacatgtatgtttgggtgtaggtatatatacttgaatacatttcttatctctgtctgctgaaggggtcaagtagcaatgataccccagcagcactgaggtcacctaccacccaaatcttggtctgtatcattcctcactaaatggaaattaaatggctaattctaggggcgaagtgtggtagacaaaagttgtacctggaacatcctgttattccgagaagtaagaaaagggccaggcacggtggctcatgtctgtaatcccggtactttgggaggccaatatgggtggatcacctgaggtcaagaattcaagacaagcctggccaacatggtgaaacctcatctctactaaaactacaaaaattagctgggcatgatagcatgtgcctgtaatcccagctacttgggaagctgagacaggagaatcacttgaatgtaggaggcggaggctgcagtgagctgagatcactccactgcactctaacctgggtgacagaatgagactccatctcaaaaaaacaaaaaaaaaaagaaagaaagaaaaaaataagaaagcgctaaaaaaataattggaatgaaggcatgtcatgagatcatagaggccaagttaatgaaactcacactggcaaaaattgaaaaacatttgcgcaccaaaatcataagatagcgtaattatgaagtattataaaaacatagcaatagtgggtctacaacaataagaaaaaaaggaagggaggaagaaagaaaaaaagagaaatgaaaagaaagaaaaattaaaaaaaaaataggaaagaagggagagagaaggaagagcccttgcttacagcagaatgctaagcattgactgtaaatgtggaaggagtgctggagtttgaaaataatcattttttgtaactctcagagtaaagattgaatcaagcaaaactctgcaatagatactaaatctagggcaaaattttgatgagttacaggatatttacatggtcttaatgtctccccacagacagtttattagttgaaagggagaaaacgtagtaattatacaatggagaaactggacaacatgttgaccaagtggtcaaattaaatcaccaaagacatgggcagcgtatgccccagatgggatactgtatagaggccataacatcaacaacgcggtatttcacccaagaatgtaaaatatacattcagtcatgaggaaatatcagataagcacaaactggtgactttatattaatacaaagcaggaagagattatatacttcaacaatgttaatgtgatgaaaaacaaataaagtttatggaaatgttctagattaaaggaggctaaagaaacatgacaactaaaaaaaaaaaaaaaaaaaaatagctggccctagactgcgcactgtgctggaggggaaaaatgcttattgcgtattgataacattgaatcaactgacaaagctggaatatggattacagattagaaaaataaattgttatctatgcaaactttactgaagtcagtggcttttatttcttaggcaaggggatattcccatttttaaaaaatacatgctgaagtatttcgggttaaagggacactgtgtatgtaacttaccctcaactggctaagagaaaagttagagagagaagagacagtgagagagcacaaatgtcaagacaaactggcttaaatgttcacagtagtaaaggtataagggtattctttgtattatttttggaactttttataaatttgaaattattttgaaataactttctaaaatacatttcttaaaaaaaatgtttttcaccattcttttgttttcatcctgctacatccaccgcagtacaggacttattactttacaccctagaccatccaaaacactgccacagaattaatttcgctcaaaacatattttctccacttactcttcagtttaagtgcagtgacttccaatttcctgaaagtctacgaaatataaactacttcatctagaccatcaagtcattggcctcaaaaggccattctagcaccatgcacttgcaagaagcaaaataaagcttcttagttccctgaaaattattctagccccaccagcatcattctttcttgtctggaattctttcttgcattatcctttctttaaagcctagatcaaacattatcaattgctttaaacaatacccaaaaccaagttccttaacttctcttctgaactccaagactataaagtactcaagtcaaccattcagtagttcatctgttactctatgtaacatatcaccctctataataatctgtgttttatatgtatgtatgtatttgccttataatatcatgcattgtctgataaaatactttctatagagccatacacttactagatattgacaaatataaagcaagggacggtaagtcaaaaaccaacaaaccaaaacacacaaaacaaaaaaataaacgtaggttctctcctcagatctcgtaacacattccaataaaacataattcacttatcctcttcgagtgccacttacctcatctacaaaatgggaatatgtgtgtcctatctacttcataggactctaatattcaagaggcactcagagattttaaaatgttctgttgtagttctggcatgatcttgccgttggcagctgcctcttcccaaactcttacatgtgaccttagatactaactgttcatttccatgccttttgataaaacccagttgtccaaactgtggatgctgatctaagaaacaattcattcctcttcaaagaactgtcctagaccaaaactaattgaactccaatgatactcttctgccctgtaaattttttttaccttcctttcctaagttaaggaacgattgtttcaaaagtttaaaatcctgtaggtaatatatccacattgacacagttgactgttctctgggcatggggacctccttcgaattgaatgaacagacacgtatccactgtacaaggaccattttgtgctttttaccagaataattaacatggctatctctctgaaaaaagaaaaagcagctaatatcccagtgggtcacgtgcttggagttgttttcaaagtaaataaaggcaaaaggatttttcttccatgaggctttcctatgtttctagggtggacctgcatacagctcacctcaggaatctaaaaatgggggttgaacttgacatccttaatattagaatttaaccaactgagctgagtggccaaaaataatctattatagcttaaaatgaaaaagtgtttcatctgaaagccagatagataaacgccagtatatctatcatcttacctagaagttaaaaggtaaaacttgcagttgttcattgccaaaatatatacaaaacaaagaaactcaacagaaattggcatctaaacatgactgcaatatttgatgaggcaccaagatatttatcaggccacaaaagaaaatatattataatttcttcttgcactattaaagggccaagaatatgacataaaatgtgtcatttttgaggaaaaacacctaacagactgcttatttaataaaatagttactagaaaaaaatagaataaaaatggattgtgtgaatacatttcaagttgtgtaccagccttggtgtgcaaaaccacctgcaagaaatgagagtcaaaagcgttagcataggaaaagacaatgggacagaggtgtttacctgtcatggcctgttggtcatccactgttaactttaaactttttccacgccgaactacacgcactgtgtgccactcgttatcattgaggttatagccagcaaaaagagtctcgggacctttgcctgtagaatatgccaaacagtcattatggacactcagaatcagtcaagcaaatgaacctcacagagagtgagagaaagagacaaggggggaaggtgagggagagagaggagagaaagaagaaaggaagaaagagagagaggagggagagaaaggaaacagagaagaggcgggctggaccaattttcaagcccattagagtcatagcaagcaaggaaaatgacaacttttacaaacattcaggtgtgaccatttaagaatctttaatcctacgcattgatccataacaagtgaattaacctgctgtcataaataggcacagtcaatacagcactgggaacccacccaaatttacacacacatttttaaaaataaattctctgatttttagttaccactttcctgctaacaaagtgtctagccatcatgtaacctctgagctctagaagacatctgactgtagcccattagctaatcgttttcagtgagataagtctcccagtagactctgggagaaggtactatcttgtgtgatggcggctattccgctcttatacctggtacctccagtgctcaacacgttcttaggttctttagcctcctaaatttatggaatgttgagtctaaaaaacacatcgaaataaaccttacaactaattgacctgtacgtcacaaatctgtctgtgtgtggcagaggcacttctggcaggtgtaggtataagtattgactcacagtaagtggaccgaagaaaaggaaagaaaaaaaaaaaataggcacagccaataaagggccaactgttgagcatgaaggaaaagtagtgatattaaacaacagtagagagcaagggattaccagtgggcatcgagtgggcaagaagtataactgggaaagtaactgctagtgaatctatataaacctatgcaaatgaaatttaaatggactcagcagagacatattatttcagaaaggtgtttggtagaaattattgaaatgattaagttagactatatccgtcacctcaaaaaaaaaaaaaaaaaaaagcaagggaaaatgcttttaacataaccagatatttttatttaaaaaataagtatttctactaatctgacattatgagtcattgagaaaaaataacattaaagatacattgtttggtaatgaattttttccctggtgtttttttaagtatggaaacatgctggtacattaaaataatgaagggcattatatcattgagtttcatgtctttcaacgaattgagaatcaggattggagttcacaatttgtttaaccaaattctgccagcaaaaccaattaatgcccaaggatcacgggaggatatatgagaaagtaaagatacaggccaaggagaagaagaaaaaaaaagaggagagcaagagagatcgagtaagagacagagaaccaagtaaaataaacctcagttttccatccacatgagatcattgttttctttcagaactacaccctatccaccagcctattgatttctctcttatggtgctactaataattcaagtgttgtatccttggctggtgtatctcaggttagaaatgagccagtgatatgagctaaattttaaaggatgaattgcctcagttatttatatctgtttgtatctttagagaaattaaattacaactccagatacatgaatttaaaactattctagatataacagttttaagagattgatggctaaataactagagaaagcctgctagtccagcaactgcaaaaatactttgagatcaaatgttgaaagcaagttccaggatgaaaaaaaaaaaactctttctaaattcaatagtgaagaaagaagtgtttaataactctgcagcatcttagcatcctgctggcagtaagggtcatctttcattttgatccttgaaaagagaacatatcattttagagctatttttatagggaactttttttttttgttagaaatatgtgcttttgaagcagcttcacttctattcttttcttttttaaatatattttgtcaaggaaaggaagcatacataagggtgatatcatcgttataccccatccttggcttgatcttgcagtaaagtcataatgcttaatctatgcaacaactatttccataacaacaggcataaaatccaattaaaaataaccctttggttcataaaaatctctgtgcgccaacttctagctcctttcatgcattattaaaattgtgaacagattgattttagaagataaggtttttaaaaaggcacttaatagtctcacttcaacacaatgttacccatgcaacatgaagtgtaatggaaagtgcactagactgggagttaagaattgcagttgctagatcatgatttcctactaaaaaagaagttgggggttgctgagtgcttattatgtagcaggcactttgtctgttgtcttgcttcacctttacattattaatctgcagatgtgaaactgaaggcctataaagctacaactacttgtcgccaggtcacacagctaaaaagtggtagaaccaagtttcatccttggcctgacctactcaaagcctgcatgcttttccctgcattattcagcctcgtagttatgagaatctttggctaacaacttaatttctcactttccccatattggaacaaaggagatggaaaagatcctctttgtggtgactcccagcttgccctacagaatgatcacactgctagcaaatcctacacaccctctgcacaagtcctggtggaagcaaatctctaagtaatacaatgtctatctagggatgctgaaatgactgttcctaaagatatgacacagaagaagggacatcattttaggacctgtctccacccacaatcagcaatttgctaacacactcaacttctggtggtctcagcattcccatccataaagtgaggagagtttccagctgatctttacagttcctttagaatttcactttctcacagaatttaacatatacaaacttgttaaagaaagatggtttaactgttgaaattttgaatttgagagtttgtcctcttgctataattttaatggcaaaattatagtaacttcaagctgttaatgacctttcaggatttcctttcctttgggggatatcaaaccatgcatcagttgtgccaacgtctttctccctgcatcaatgtattacagacttaatgtgtgtgtccctcagaattcactatgttgaatttctaacccacaaagtgatggtatgagaaggtggggccttcaagatatgattaggtttagataagggtggagtcccatgatgggatagggccctcacaagaagtggaacaaacaccagagcgtcccctctgccatgtgaggatacaaagagaaggtggctgcctaccagccaggaagaaggccctcaccaagagccaaatctgctgacacttcaatctttgacttcaagccttcaaaaaactgaggtgaaaaaaaaattctgttgtttaagccatccaatctatggtattctgttgtaacagcccaagaagactaacacagtgggcaatattttaaagacttttaagaaagtctatagctggctgggcatggtggctctcgtctgtaatcccagcattttgtgaagttgaggcgggagaatcacgaggtcaggagtttgagaccagcctggccaacagggtgaaaccctctctctactaaaaatacaaaaaatagctgggtgtagtggcaggaacccgtaatcccagctactcaggaggctgaggcaggagaattgcttgaacccaggaggcggaggttgcagtgagccgagatctcgccattgcactccagcctggatgacagagagagactccatctcaaaaaaaaaaaaaaaaaaaaaaaaaaaaccacaaaagaaaagaaagaaagaaaagaaagaccatagccttatgtctattaaaagacatcattccttatgttttgtagggagttttgatttgtttgtaattttacacttgatttttactgtaacatattatttaagccagatatattaatttttcattttatagttaaagaagcagatttaaaagtgttgagcgaattattaagtctcaaaggcagtaagaagtagagagaagactgagattttgaaattttctattttcattaaaatgtgttttccacagaaaatgatctgcaagtagtgtaagaggtacaacgggactgaatgcccccagctaatatttcaccagaccaggtcagaattcagctctacaggctaatgttatattaaagaattttagaactaggagggacatgagaagtgtagaatttcaatcatcatctacaaataagaaacatgaagtgcaaagacattagatgacgtccccattgtcacaactgttaaattaagaagcataggtctctagactctcagtctaacaagcttttttttttttaattattattaagacagaatctcgctctgttgctcaggctagagtgcagtggtgcaatctcggctcactgcaacctctgcctcccaggttcaagtgactctcctgcctcagcctcccagggagctgggattacaggcacccactaccatgcccagctaatttttgtattttaatagacatggagtttcaccatgttcgaggccagtctggtctcgaactcctgatctctgccagccttggcctaccaaagtgctggaattacaggtgcggaccacagtgcgcccagccctaacaaacttttaaaaaattattctgttcattagacaatgctgatttagaatgaatttctcaaggcacaccaaaatctgagtctgagtttaataagtctgtcagtgcttgtcaacagagtttgacctaatctatggtacaacagccaaattttttggctggtgatattcactgggtttgctggtgaccctgtagctaaaacctattgataacagatggaagtagaagcagtaaacatttcagttttccttaattcagtgtaaattgagtgttcttccacaacctacccatccataaattcaaggtgtctctaagattaactcctaagaagggctggagttaaccctaacttgaggcatggtaccgacagaggaaaatgtgtgttagcaagtatatgtgtgtatgtgggtgtgtgtgtgtgagagggatagagagagagacacacactcaaaagatggtagatttttggccattttagtaaccacatttgctaatgacttttacttccattttcacatcaacatgattcttaggtttctttaaatattagtctcagaacaaaggaaatttcatgctataatttgtagttatgggaggtaatggtaaagaaaattggattttgtccccagtctgtcatcaactaattatgttaccttgaagacgacatgtattctctctattcctatttttatctgtaaaatgataatcccatataaaagcatattaaaaaaaaaactttcctacagccaacttcaaactattgtcattcttagaaggaccaaaactacctcgcggctacatgaaagagtgcaatgttatagtgaatatctctaatggtgcaagctttttatttttattattactgttactaatttcatcacttttgttttggcacagtaggcagagagcagaccaagccttaaagaggctcttctacccaagaattactacactcaagtgaagccagaggacaatattaatacgtgctagaaaatgtgtttattattttatatagtcaaattttaatggtgataacttttttcttttgacaacatgtaattatgttacaactatttttgttaatcactataaattttgttaatcactataaattatatttgaaagtactgaagcacagactactaagtgaatgtatttaagaaagaaagaatagcattcaagggatgcatagctatgctacttagtccagctctccttttacagacatctccatgggaggttagttgccttgcctctgtcttccttgttattggcaggatgaaactaatgcctgggtcttgaacttatttaggacctaacatgcattacctaattgtctggccaaagtcagagagggtaaacattctttgacctttgcatatcattcctttccctatttatatttttacatattcaaaaaatattgttctaaatacattttaaacaaacccacctgctttggatagcagaatcagtacaatttacaaagaacctcactgccatacacagtttcggaagcagtgatgaaacgggtgtgttttttcacatacctctttacatttggttcaaatgtagattctcatatatttcaggggagatctgcatgcatcataagaaaagcttgaacttggttgagagttatataaacttggatttgaaagcaggtattgcattttctggttgcttaggcttgggtatgttagcttctttgagctttccttccatcatctataaatgtgagataataatgcctaccttatttcatagatttgttgtaaggactaagggatataacaaatctaatgtgtttggtgctttgcactttgtgtaatctcaatgaatattaatttcctttctctcctttttatggaaaataagttaagtaacagtgcatgagttctgcaaaccaccaaaggatctaccattaaaaaatggttgacagtcaaatacactatacactatataaaaatgtatattgaaagaaacatccacaatttttatttgaacacgcacactgcagtctagttttttgaaattaggcctcccaaagtcaaattttttggaacagttgccattttaacctgagatttcacagtatttgtgtttggttatttaattcctaagcattcaccctgaatataaaaataaatgtaaaatacacttgcaagggaacctgaaatagatcaataacgacatgcttaatcttgctgggttaaaataagatgtacatgatactaaatttggatgctttttgctacaaagccttctgtgcaaatatcttgtgaacaatttatactggtttatgaatgtggagggaaaatatagtgaagagaaatagagaagaataaaacaaagctgagaccctttcaagcaatggaagcaaagacctctaagagacaaaactggcagatgcctctggaactgaaaggtggatgtagctgtacagaaacttgaaaaaaaacaaaaacaaaaacccatagcagttatatttggagttttaaactcttagatgtatgtgccccaagtgtaaactcattgcatctctacacaccctttaggtagctttctccctctagtggtgcatatattttaaagaggttaactacataaatgaactatctttatggtgtaccctgcttctggtatatatatactctggtacagtgcaaaccaattggttctaaagttcactttatttgtctaacatattcattgtaatttctactttaaaattctacctagttatttcagtggttaatctgacttactcaattaaaccatttatcgagcatgaagattttgatgggtatttctgcaaaaccatcacctaacaaattgcacagatgatggacaggcaggaattttttaaaaatactagaatcaccttatatgtataaattggttctatatttatacatgattgttcaatatatttagacctacagcacctggtaattgaattaggaagagaagttacagtaccatagcatctgagaattataaaattttaaaactgaatggtccatattgtgtctgttgtttatcccatttagctactcatttattctgggttccatggcacccatatgctattaattttgtttaaaatttattttgtgccaaataccgatctcagcattgggaatatccgagttacagtcaaaggaacttacattctaataggtcagaagtcaaaacactttttctgtaaagggccagacagtaaatttatttgactttgccgaccatgtgttcaccattgcaactcttcaactttactattgcaatgtaaaagcaagcatagaatgtatgtaaacaaatggagtggctgtgtttcagtaaagcttcattaaaacagggagctagcttgagagctatagtgttcaagaccctgtaagataaacacgtatagataatttaaacgtttcccataaattctgcattgcatattaaagaataacagaaacatactcaagaatttaagtgcgaggaaacctgagttttagattcgatattgccactaactgtaacataaccttaaaaatactaattctcctaacttttttactgctgtttgttttcttaagaaacaactaaaatcaatttttaaaggctttaagcccgggctccccaccccccaggccacagacaggtaccagcctgttaggaagcatgccgcacagcaggaggtgggcagcaggcaagccagagaagcttcatctgtatttacagccgctctccattactcacatcaccatctgagctccacctcatgtcagatcagcagtgacaaccgattctcacaggaatgcaaaccctattgtgaactgcacatgcaagggatctaggtttcatgctccttaggagaatctaatgcctgataatcagtcactgtctcccattaccctcagatgagactctctagttgctggtaaacaacctctagttttactgattctaccttatggtgagatgtataatgatttcattatatattacaatgtaatagtaatagaaataaggtggatgatacatgtagtgaaattcaattatcctgaaatcactcccgtctgtggtaaaattgtcttccatgaaaccagtccctcatgccaaaaagtttggagaccactgctttaaatgacacaaatcaattgcaaagtccttctacttataaaatctaggataaattaggttcctttccttttctgcaaatttagaatagaaacattcattaaatgcttggggtgtgtgtgtgtgtgtgtgtgtgtgtgtgtgtgtgtgtgtgtctgcatgcacctttgttaaaaatttggttattaggtttctacgtatatcaacttttccaggtactaacaagttttatttggcagttgactttggggactgtagtctctggggtgaggcaggaccttgtgagaagctggaagcaagccttgtcattgtgacaatgatgagaagatggaagcaggagctaccactgcttgatgcctgagtcatagttgctggcagcagtacttcctacctacaaatgatgagaggatatgtttcccaggttgtaattatgacaccttcagcctactatttgactttcccattactttctggttttaaagtaatctgtcctccagttaaaaaaattcaaaggagattaactcctcattacaggtttctattttatccttctcaatttttaggtattgagttgtgagtgaaacctgtttgttttaatttttcacaagaatcagctagaacattcaattacaaattaaatttagacatgtaaatggcacttctaaattttcctttttctgcctcttaacattactagaggcaggatgagccacataatttgagagtccattgcaaataaaaatgtggagtccttattcaaaattaagaatttcaagatggtagcagtggagcattaacccaagcacaacacaagctcagcatatggcacggtgtgactgcataagttgtatgctgttgaagccagttctttttaggagtataagttttgtgcttatttatttttgatgcttcctttagtagattctacattcaggaatgagcagacaaggctggaggcaaaattcttcatttatctatgtgagaagcatagttgagtcaccttccccagagtatccacacttaatgacatggtctctggggtatcagagaagctgtctcaggcttgttttgctggccaggcctggtgccaatcatgaactgggcttggtgatacaccaataaccctcagaaccaggaagcaaaactacctgctgacccatgtaactcctttctcttttccttctctattcctcctcaagtgctcctcaatttagccaaggatatacccttgagaactattcagaatgtcccataaagagatgcttgcctccttttttttaataagcaaagagatagagtcctaaggacagacacatttctttatgctaaaaatactagaaatactcatcccagttaaaaagtactttgactaaatgatataaagtcagacattcagcttgatgtttgtttttcaaaaatgaacactaataacagagaaagacattttataaactttaaaaaatccactggagaaattaaatagtcatgtgctgaccaactatattgcatttattttttgacccacacagactgttgagttttatcctggttctacaagttattagctgtgtgaccttgagcaaccttcttactttctgcatgcctcagtatcctcatatatctcataagctaatactagaaacaatgtaaatgggtttcatgcatcttaataactcaaaactacttttaatcaaaggtttaatgcatcttaataacgcaagaagcttaccataatctgatttatggtaagctttcaattatagtagtgataaaagtaactatcatcagtattatgttgtcatttttatcttctcctcaatgagtttaaaatctcagagaaaatatgatatagctcagtgccttgaacataacggcaattcactaagtatttgttgaatgggtttatttgtgtaaactttgtgggacttttttttaaatggtagatgaaataccccttgatattaaattaagccaagtagttgatgaaaagtaactccatcttttaatgcctccattcactaagaaaggtaaatataaagaaaactctgtcctcctgttttcatatttagcaggatggaatttggtaacccctacagttggagaacttgagtaactcagttatctggataactatttggacagctttttcgctcagttacattgaaaataaacttcatgatgcatacagcctagtggaacaaaatgacctaaggttagcagtgaataacttccgagtccaaaggaaatagttggcttagaaattgggggaactcaaaacttactgagtatttaattataaaaaaacacagatcttgtcctcaagtggatgtgaccttggagagttgttggaaacaccctccagagacttttctgccattttcctaaatgatagcaaacttattctattatctacaaaataaatttcagtatttctcgatgcttcacctcctgctctatttcttctggcctataaatatcattgcctatgcaaacgaataaacaaggttaaaatcacctacttcatctactaagaaacattaagcctctgtagttttgtcattgattgtacccatttatgacagacaaggataaatatctcttatgtaaatatatttcaatgcgaaaaacatacattttaagaattataatttactttttaagaagagaattacatttacaacacagtaaaaatgaacacaaattaaataaatatatttctagaaaaaatgttctaaaactagcaatctttaaatctaatctagctcaactggcaagtttaagaagtataataaaataagcctaatacaatgaaagtaacaattcagactgtgattttatttttttcaaaaggtcaattccaagggatgcttatcacataacaggacagctagcagatataaaattgagtactaaatagttcaatttgcttttgagtaagcattaaaaactgaaaatgtattcagtgtttgtgtagtgttaaagaaaagggttatactgatttatagtaatactcatttaatgtattttctgcaatacatacacaatgccaagttgtctgaataaaaaaaaatcaaaaagcatatgggtcctgagcatttggatatttacaaaatgtaaactgatattccataaacgaagccatggattatagtcacaaatgcatttttttaaaattaaatatatcattccatgtctaaatacaccactgtaatagttatagcatttttttaatgaggtcaagaaggatgtacattttttcataattcaagatcaatgaatttaccttttactttccatttcttcttaacataaggatagctgaatattattaagtacatgactgaattcacaaaatttagttcatcctcagtatttttgagatattctagtataaactttttccaaaagtaagaagcatattagagaaaaaaaccctaagtttctgcctttattaagtttatttattttttcttcctttctttttactgggaagtcattataatgcgtagaaatctatttctcagtattgtcaactttatggacctatttgcttaaagaaaacaaattctaagaaatgtgacaattgatgaatggtagcatctcgtgtcttgctttctttttgtttctttacataatgattgttcaaatgaaggctatggacaaactgtacatgattattaatgcattcatcatgtgaacattcgaatgcaatatattttttctaagcaatgatataattattagctaaacccttctttatttgaattttaagattttaatgacagtgctaacttaattgttttctttaatcatcactggattatttattaagctagcttttagtcagtggcttgaattctatgattctctttgaccatttattttagtaattgaaaaatattggaattaattctttgaagttatctttgggcaaatgtcttctgaaatgaatggctcaccttatgctccaggaaatgttctaaaatggcaattgtccaactataacaataacttagcaattaaatcttaggccaaattaacttggtttatctgaagagacagtgtgtgaaggttccttggaactggtcaaaccactgatagaaatgttgagttatgtctctgtgcctgtttctggttgatcttcctaaggtaagattatgttagattttctattagtaggttacagtcaaggacgataacttatactaacacatctagaagcatcttctcatgtgtggctattcaaatctggtttatttctcatgatcttgttcacagatgctcccaaccagttatcatctgagaaaactgagatcactgaagaatcatggtataatttccattggtagacatatttttcctccctattatatgttacttcaactggctcagtgacctggaattgctttatataaccttggcataaaatctaagagaaacaatagattacatttaaaaatattgtatgttttaatcaaagacaggacataatgtttacaagatgttgctaaaattagagaacggggtgcaaaacattcctataccatggctctatatttttaaagaagcacatattataccatgtgttatatattaagtacataatgtgccaagtattatgtgctataagggcatttaagacattaataaaacttttctgtgaaaattgaaatcctaggctacttttatgtattttctgtttcctttagcctccaaatatgaatactatttctgattaggaacaaaatgttgttctgaaagatattcattctattttgagagtcaaaattagtaggaaatttagcctgtaaattaatttaaaatgtacatgatgtattacaaatatatgatctagtgtagctttatcctaaatattggtgggattggtttaaattatattttacttttacccacttttgattttttaatcacaatagcaaagaaaaaacattgtagaaattatagatgatgaatagaaaaaaaaactaaaaattacctcaatctcaccagcagatataaacatttagagggatatacttccagaaacataatagaaaagcaattttgttatgaaggtcccttgcctgttccataattgataactcaaaaaaaataggagatgctgattacttcttcactgcctattggctgaactaattttacttaattgattgcataaagaatttcttgattaccaatatattatttttagcagtataaaatttctcagttgatttattaaacagaatttattttatggggtttctacaatttttatttattgtactcatcataatggtctaactccatatttatctgcctatttcaacactattaggtgaatatgtctgactactaagagaacacctgcattatttgatttaaaaatttcttttttattttctttactagaaacttataattcatgaaaaatctgtaaaaacaactttaagacatgtcattacagtatgtttgttctataatattttggttttaatttttacatgcataaactacttcctttgcgcctactgaaatgtaaaacattttagaattctttaagttgtatagaagttcatacttatttacactggaaacttcctggttccaaagctggttgatttctccatgtatttgaaaatttaatgggtgcacttcactagaaacctacattcttcgtaagcaacatttaaaagggattttgttaactcatatcttaaatcacgcatttcaaaagcaattttaaccataacatttatctgtagaaaaaggcaattgtctttgaaatttaattaatttcaatagtactatgcataaaatatttcgagtctgtatttagactgatatcctgggaagtgcagttggagagtgaagaatttccacaattgtatgaatgatgaactcaaagaacaagtaataataaacaatccaattttaagtacattaaaaataaagtaatttagccttttagtatttcttattcatcttcaggaaaactgttttcataatgcatttcttatccatcttgctttttgctcacattgttaataagtaaaagaagtggataagagttctgagcacacaaaacatttcaatctccaaattctttgaccgtccccatgatttaaagagccttgcccacttgacttatgtaccacatgttagccagtaatctgttgaacagattgtaattctcatgggtattttatagctaaactgaaaacaattttcagtcagacaacatatagaaaagatgcttgtgtagaaagcttgctgctcctacatctgctctgaggagagtgtatcatgtggcctctattctaatgacagctatttggatcaccagtggatccaattggatccagcaactggatcatctgccaccaaaactaagatctggtgagtagcttatggggcgacctgaactgaaagatttgtccaacgggacaaggataagtaatagattcactagattctctttctagaaaagtcgaatatacaacatatagagagtatacagccagtgaaagggatgacagaaagaaagagagagagcagaaaggaagaaaaggagggaggaaggcagagaagaatacagtaaaggaaggaagagaagaaactcaaaacaatggaggaagtggggtatgtttagaagcagctcttcataacgacaacaaataaaaacatctggccaacatgctgtgttctcttagatttggggatatttgtataaaagaaactcccttttcacagaaactaataagagaatatcaagtttagaatgtttcttctaaaactttcttggattttataatactttttacctaggcaattgttataatgccgactctcaacaattgaagagaatttgatcaatttggtcaacactcaagaatgttgcattactttgagagtctctgcagtatcaataatgcttaacgtgaataaattaataactgtgcttggtttcaacatgcattcttaaactgcacaagagtagtttttagaatatcacagcattttatatttgcatataagcaatcagtagattaatcattcactaaaatagaccaaagcaatctacttttcaaccactcacagtatcattctgttgcctaatccatgtagtcatctaaatatgcaatgaaagctgtattcttctttacaattctcataagtttaaacatgtggataatttaaatgggcttccatttattcatttatttttattcattttttttttttttttttttttttttttttgagaggagtcttgctctctcacccaggctggagtgcaatggcgcaaccttggctcagtgcaacctccgcctgccaggttcaagcaattctcctgcctcagcctcccaagtagctgggattataggcacctgccactatgccctgctagtttttttgtatttttagtagagacggggtttcaccatgctggtcaggctggtcctagaactcctgacctcaggtgatccacccgcctcagcctcccaaactgctgggattacaggcgtgagccacagcacccagcctcaatttcgatattattctaaagactcattgccatgtgccaatacactgcctgtttttatttgttttctgtcagaaatctatgttcattctttacattttacatgcaattttttttgatttttgctgaaaataataatttataaactttcttttcattcccttcacatatactttaagtaaaacaacacagaaacaacaacaaaaaacaacgagacttctgttttctttatttatactttgaacttcccttattccttgagcagcttctatcctaggcaggtggatagcaccagtcactgacaggcaatgactggcagaactccacaaatcaagtgactgctgtgtgaaggcagaggcgaaagactcccttttacagttttctgctctcaggcatcaagcagcgactctaaactgaatatttactttatgttaacaagctccagcccctagaaatttcctcatatctttttaagtagcttctcaaatggcagcctgatcaaagcaatctaatatggcttaagtgccagtggttgacattttgcattcttttattgctttccatttttatctacataaaaattggtgataactaatatccatttgatcttttcattctggtaataaaatggtaatacaaagatcttattatctactccagacatccatcaaagtacatttttcaaaaatatactatgtgaagtgtttcttccctatacccaagtcaaaagcgaggtcaagtacttgtccttagatgccccttctctccaatacttgggcactggactgcaaataggaattgaacttcagcccttgatgctttgttcacactaatgttatatgtaattgtgttgtctctgcctcttaaatacactattttctgtgagaagccaaaagtacttggaaggtctgcttaaatattttttttaactccagagtttttattcttctaagaagacaagaaaaaagataacggaagaaacaatactggaaatgaagaagtaagaagagtgaatcttaatagaaagaaaggaagtgcaggtaggtgggagaacagacaaatgtaataaggcataaagaaagccacataatgcaaacaaaacaagccccagagatcatgagtttattaaatctatttttatatggatgcagaagtgtccctgaggacgggtgtggtggctcacgcctgtaatcccagcactttgggaggccaaggcagacagatcacctgaggtcaggagttcgagacgagcccggccaacatggcaaaaccccatctctactaaaaatacaaaaattagccaggcatgctggtgcacgcctgtagttccagctacttggaaggctgaggtaggagaactgcttgaatctgggaggcggaggtttcagagagctgagattgcaccactgcactccagcctggatgagagagcaagagtccatctcataaataaataaataaataaataaataaataaataaataaataaaataaaataaacgaagtgtccctaagccttccagtgaacaagaaggtcattccgtaattatgccattgatttggaaaaacaaaaagaatagaaagcataagaaaaccaagaaacacaaaaggctccctgaatccactgaatccactgcatatttaaagtagttactgatatgacaattaggacttacctatagttgataggagcaagtttagttttcaaaatttcaatgtatttacacctcaaaagattataggtctaacgatttttaaggttaccagaagaagagagaaagaaaaaaatggcactacttaatcatgcagtacatcacaaaaaaggccaaattttcagaaaaaaaatacatagaaacacatagcctaatgagtttggatgtatcgtttggaattattgggcaccaaacttgaaattgagaccatcattataactctgagattgacattaggctatgtgctttggcagatataaagaatgcagaatgagactaatgtcctgtacagaacctactaacaatgcacttgagaaaatttcacaagcaatagaaaattctttttgcattctttatcatttttaaatgacttactaaagtcatttaatactatggaccaggcaagagactgtaaaacagtcatcttctcatgcaaataattcacgtgctagtcacaaaagcaccttgttcaatatgatttaaggtttcaacaatgatttgttaatatttagtttttgttagtacagatttctttgatgagttttaaaatagcctacaatttgtgttccttcgttaattcagatagttttttcctttttatgttaaaagaatgtgactgtacagtcccttcccatctacccttattaaagtatccttcactgtctaagaaagaaagaggaggcaagggtaatctgattgtccttctattcctatcctggacagaggagagtggtgagccatggataattcatttctgtgctcaccttgcagcccatggatttggaaacactgaccttaatctaatcccaaattgtagataaacatattttagcaatggtataagctaatgagcatcaataaactgagactcgtctgggattgtgtgcagtcacactctgtaatctgcaagatcaaaacatacatttggcagtgaaatggccattattcagagagacagctttttaaagaaagtaccctatctatagctgaaaataagcttttttatttttaaatgaaaagaggctctcttcttccatttaaggatgcttgacagcttttcttcccgggggggaaatggtagcaataaggaatttgacagagataatacttggaattcagatctggcctttctcagaggaaattttaacaaagggctgtgccctaacatgtccatggaaaactctgtcactgcatctaaactactgacacaagagtggctgaaaaagaaacattcattcaggtttgaatacatgtagctggaccctctaccctcctcacctcccacccatttttcactggcaaagattagatagtctgacactatgtatattttccatataaagtacaaatgctgtaaacttggcggtggggtagggaaagagaaaatgactataggaaacagcagcacaattttaagtaaaagtagaaaagtgtttctggggaagtttccattcaaacgtaataacttagagtttaatattagtctttaatgtaagataatcttttatgttttactttgtatatttcttgtgataattttcttaaaagatatcaattgaggtatttcatattaatttcacaatacagttgatagcttaggtatggcacaatttttagagataatggtgttatcggctgtgatttaataaacgtacattaattttctcagtctcagacaaacctatggctcacagaggacacatgtaataactcagtctttcattaaactgcaagttatactgagatacagatattgttaatttagtttttattgagtacaaaatgcactccaggtagaaatcactgctcatttaatcactgtgtgttaggtttgcattatctggaatgtaaattcctccctttcctcaaaggtgagtcttttttatggaacttgggtttcttactacacctgctccctattccccaaataaaacagaggcaaaggaaatgaaaatgttacctgttcattgaatgttctttccagtgactgctgtcaagttaaggaatgtgcagtcctgtccgatgtgtacactggaggctcacaatcattaattgaattcaagtatcacatactcattaaaaagggaaaacaattcactaaacagcaaaaacctttgtcctcaaaggtattattctgtggaatatccagaggaaaaataagactgtcctcaataccagagtctcatgatataagccaaatggcaaacgagtctaacaagggtaattatactataaacatacatttaaaaaatcattgatatagccacagaatacagaatcacatgtcatttgaataattttcattaattgctatactttgcatagttatattttgtaaattcaaaaattcatgccttgttgcatgcttcatataaataaaataaaaagagtacataaggtagaggtctagaaaggaatattggtccccacaaggattttctaagatgcaggagggatcaagaaaacctacagccagagtgaggcacagatctggctttggcaaagaatattttgtgagttgccactttgcctgcatctatgcccccagctgaaagcaaactggacctggtattagatgtgcaaaatgtatatccttttaggaatgcatggaggagatagagttggagaggagattacatatatttgaaaaattccgcttacgtgagagctttgacaggttattttcaggaactattttgttcgagatctttttaaatgcctgggatattggttataatttattaacttaatttttaataagtcatcattctgttacttttttattggtctgattgaacaaactcattttaatgttatttttaaaagaatattaaatatatgtggatagaattatgagttgtaagaggcacagtgtttgaaacagtacgtattttattaggaaaatagtcttgttttcgcaagtttaagacctctatttgttcctcagaggatgccttattgccacttgaaaacatggccaatgctgtggggagtagactccatcaactcacattcagcattgttttgagaatagaaaaaaattctttactgtgacagtgagagattagaaatttgttagaaccattttatttaaattgctgatgactttgtgttgtgatcattggagatttcttaatgtgatcagcaaaacctggaaagaaaaaacctgagcatttatgtacagaaataaataagtttacacttaagataatgccacaactcaaaataaaatcacagtccttatatcctttcagattttcatccaaattcaaagaaaactcagtccatgcatcttttcagactcatcagtttgcatgcatgtcacagatttgaagggttttggttatttttgcagagatatgattaggatgtaaaaattcatcatataaacattcttaatgatcaaggaagaacgttttagacgagtaattttctatgtctatgtaaaactttagatgggtttaatagtaactctcgaagtaagaggaattaagtatttttttttgtatttgagttaaaagataaagacaaaagaaaataagacccacaatattttctcctatttggttatgaagagaacaactggagtctaaaaatgccacttgcagtatctaaatgtctataaggtgctggcacattctgttacaaaacacttgtcacctctttttccatatagaggtaggaactgcagtgggaaagtcttcagctgtacaaatttaaaaatgaatttttacaacccagatgatggactggtatactttaaaagtgagctcatgagttttataaacacatttctcttgctctctctctctctttttcttgactagcttacatcataatggaggaataacattttaaaaattttgaataggcacttactggaattacagttaatcctgatacaatctagatggggaagaatagatgaaaaatgaaaattcatccttcaaggtaatagctgcagacatccaataaaattacagtccacccttccggggacagacacatgcaaatatggccactccatatcattattctttacatacttataaagcccagatgttttgttataaaagtttaccattggaaacaacaatagaaggttttaaaaatggccaattcaaacaaagctacatggtgacaaatctaagtgaagtaaagaattgttaaatgtcaaagatgtttggcttagactggctgcaactttctccccatctgtgaaagaacatatcattgttttccgcaaaatgtaaaagtgctccgtcacaatggggtacagtgcaggttcagctaggctcagacatcttggacctccgaaatctaatatcccacaaaggccaacagaatccttcagaattgcagtggtcaaatggaaagcaagttaaaattattcttatcttaccctaagggtttttgttttgtttttaaattttatttgcttgggcataaaaaggtaactgccagatgttggctggattccataccttgcgttaattggaggaggaaagaaacaactgtatgtttcctttagaaactccagtggctaaggagcagtcattattcaaggcacacaagcctatgcctctcttaggagctaacagtgttatctctgtgtaataagtgtcgtggttcccttgattttcctttcttgattttccctttcttatatttgctttatataaaagtagctactataagaacagaacgtcttgtatgggtaacacaaactgtaattatagtggttatttttaaaagactgtaggatgtttcatatttattttatatgtatttgttggtttgggttttattatttaatgcctttggagaacataaaaaaataaacctagattctgtttccatatagctgagtttgtcatgtgtcgtcaaccgcatcagaaaagtggttgcaaacagccaaggaccagcacctacacacctctttctacagaatgctttgctgttcgaaaattctcatgagtgtttccactttgactaacagcagctttactgcatgcaattaggcgatttgttttgattggcttgtaataacctgtcatcgtcactagagggtactctaacagaacagtaaaggagagtgctctgtgttcttaaagtagtatttttttaaccttaatatttaacttaatttcactaatattaattaaatatgattatatgcaataagataccaatgggataattttatattttatgagttatcgttctgcccagcacaatttgaaaatgtaggtggggtttccacaaatgccttgcctcatcacattttattactccttttttggggtaaatctatgtagtttcaaatttcatttttccctctctgtttattcatttctatatacgtgtgtttaacactgtcaaaaatacagtaaaacctcattaattttgactcctcttattttgaaataatgataacactgaaaatttgggcagagtatttattcttcctttgatatgagcaaagatctcttaagaaaaaaaattaaactcataaacaaacaagactttgaaaagccaagcgtgggaagaaaactgatttccaatacttcatgttgatggcatagtttgcatgaaacgatgtgctaattataattaatttttatccaaccattaaaatcagcctagagagccctttccgtgataagactttccaaactattatgtttttgagtataatttataaaaataaaaactgcttaaacaaattttaaaatctgcaattcagactttttcctaattcagcctggtttttccccataattcatctagattggtgaggttttactgtaatgggtctttcttaatgctacaattaagcaggaaagcattatctttctgtagaagagcctgtgtctctagtgttctcatggctgtttgctaagggccgcagactttgggcattgaagggctgtggatcgctgtttgatagcaaaataccaccacacagtactccgaaacagaaaagacagggtaccacaaaggtgattattcaaaggagaagcccatggagtagagtaagaacagctcttgatctagataacaaagcagaaatttgatattttgtgcaaatcctttctaagaagacatgcttttatttatctgcaaggatgtcacctacaaccgatccaaatgtcagtgaatatatcaacagaaaattcagcttgaggcaacctcaggcttaataatttatattttcaattaacctcactgacagacatggcctctcttttaagaaccctcagtggtagaaatcacaaaacagtaagttatgttaaacataaaaaataaaataaaaaataaaaagatgcccccgaaaacctcaaattactttaaatgatggaaataagaccattaagtgttttaattttccatggcaaacaggctacttgatcaatgtttgcaggcaaattgaacaaaaagtaaaaaagtgttagttcaatgggggaaggcaggttgttacctagattgaccgtcagtttcacacgtcctgcgtctagctccaggcggagggtgtcagcagagtctctagaagtggttgccatcagaatgccatatgcacgctgggatcggaaccgtaaggaaacatcctcagcctccgtatgcatgactacggggagctgaattttcataaacatgctcccatcatagctcaaaaccgttgcctctagagatggaaaatgaatatgataagttcttggatggtatagcgcattaatactttaaagaggaaaaggatcatttattatcatttatttaagacttccagaacacaatactacaaaatcaattcatcttcttcagaaataaacaaaactgtgagctggaaagagaagtcacagtagaggacttcccttgtgagatatttgctaaagcccagaaacagagatatcagcagttcctttttttttgttcccagagcactttctacctatagcattaatcatgttgaattttgagtgtttgattatatgccccccttctcaagagcaaagatcacgttcttttgtacagccacagtgtgagcctagtttgaaacaccagcgaagttgtggatttttttgttgttgtttttgtttgggttttgttgttgtttgtttgtttgagacaaggtctgtatcccctaggctggagtgcagtgacaggatctcagctcactgcagccatgacctcctgagctcaagcaatctttccacctcaacctcctgagtagctgggaccacaggcgcatgacaccatgccaggctagcttattattaatacttttttctagagatgggtctccctttgttgccaaggctggtctcaaactcctggactccagtgaccctctcgcccaggttcccaaaaggaacctgtgcccagcctccagcaacttttcaatgcatgtttatgtatggtaagcccactgactagttctgtgaaattagtcaaccttgccttggctctgaattattcatctgcacaatgagagggtactgccagaaggtttctcagggctttgatctgttctgaaaacctgtagttctaggagaagttactgtcatcatttttttttcataatctctgccctgatagaattatttttaaaagaaaaaaaaaagaaatatagcttaactataggaactaggccaatactttaccaaaggtgatgttcaaaaagaaaaaagaaaaactgatattaccaaacaacagataatacttcttttgagccattatgtttagcaaggtaatttttacaaaggcttccttttaaggaactgttacttccttttaagattaatttatagaaggggagtaactttaaatattatctataagcacagccctggtgtcctgaataagttctcatgcaaagcagtaatgatgtgcttttgctacactaaataagcatgggggtgggactggggagcttgtgaggatgtttgttactaaactaaggcagatggcatcagtagggaagttgcttagtactgtcttaaacacacaaagaaatgaataaaaaaaaaactgttgatgacaacctgacggctttaagaaatagtcaggactccttaatgttaagcaccatatggtagtggaatattgcaaaacaagcgtgaatcagtttgctttctcattggttccgataactcaggatgctacttaataaagaaaaactacctggaattaaaatgaaccaggaaattttcattattttgcctacttacacagcatagcaattaagtgtactgatacaactgtgttcaatattaggactatatttagagttgtggttttgtaagtttatttttcagaaagtcaagtactgtttctataagactttaatcactatttgttgtcatgatgggattaagtgagaaccagaacctctctaagcactgagtgttccaggtctccctgcttaggttagctcccttctcttttccatctacctcttgacttaagagatctcagtcaactcatatgctcactcctctaatatttattaagcgttctgacttctctcctgagctgtagcattcattgcctattggaaattttcaattggaatatgaaatttcaattggaatatttcaattggaatattattaaactcttgatttactcccttcaaaaatgaacaaactcaaaacatgctccttcttcagtcttctccatctcagtaaacatgataatctcattgctcagacctaaagctttctgatttctcttactctctctgccatgtccaatccatttgcaagtctgcaagtcctaaaggctctaattccaatccacattctgaattgattgctgttcacctctgccactaatgtccctcagactttgctctcatctctcacctacaccactgtagtagctccctcaaccgtgttcctacttttttaaacctacaaagatcagtgtgaccctggccccagtccatctctctggcctcagctttaagtatgtcccgcttcttgttcagtgagctccagatacaccaatttcatgatctcactgaagtgtttgcacttttagatccctctgtttaaaaatgtttcaccccagatctttaaatagctggttctttcagcatttaggtctctgctcaaatgttactccagagagacctgctacccactccagttattcaatatatattcatcatttcactttgttgaaatgaccatttcttgtttgtagagtattatctgtatatgccctttagaatacaagtaccttgagggcagagatcagtctctcatatgcattgctctatcagcagcaagtgcccccacaatgccaggcccacagcagagcctccataaatattaattgaatcaataattgcacacacacacacacacacacacacacacatacacacacagtgagctaatttcaatttgaataccaagcttacataaaagcttaccaaagaaattaagtatttattctgcttattgcaagtgaaatctaatttcagtactgtgcatgaacgaaatatgtaataaggtccactttgaaggccaaaattgggctgcagaagataggctagggaagtgtctatttatcaaaacaggggcctcatggttaggcaatgccctaagcactgataaaacaaaatatggtctttcaaaaatatagtggttctatataatatcatatttttttccaattagacaaaaagtttcccaaatgggagtaaaatcccagtggtcaaagaccagtgcaaataatcaaattgctgttgctcaaaaaataatgaaaacctgagtgtaaagttatagtgaattctagagagaaaaatgcttgtggtataattttaaaagaaatttgatctttacttttgtttttcctaaactagacaatcatgacccatatctgtaaagcaacaagcacccgaataaaagtgtaaaagtcattatcatgtgttcagttactttggtttcatatagataaaaggatcaaaacagtgtttgttttctcttctttatttaatctctataactaggctctattattcaataatcacatttttgaaataatcatattcttctgggaaaagtagcttgatttgattgaaaactaaatagggggcacctcctttaagaaatacagatgactgacaatggatcataaatatagtgtgaaatacaacccagagaaaaaaataatcagaatcattagcctttaacattctccagaaagctgcaggactgaaataacatagtaaagtaataaaactagagtgcccccgagtgtcatgttaaataattctcaatgtgaaaataacttgttgataaatgacaaatgaaagcctaaacgattcctcacaattagagttaatgtttaattagacaagaaatggaaaatgcacagggttgtagtctagagttgccaaataaatggtaaacaacattctgacatttgaaggttatgctatttggcagcatccttgaacactagtaaaattatttcatcatttagaatatacaataattctttaaaaggctaattccaatacaatacttcccactgggggagaaaaccagtttcaactttgtcttctatatctccttctcccttgtcattaagtttgataaatttccttttctacattattctttgttgcagtctaaagtgtacacctgtgctcagttttgccgaaaggcagtcacatattgtgatcaacgatgaaaatcagacagggagccaaattatattgctctgacatctgtccctccatctgttagaatttaacaaacagtataaagcagatctctgattatatcaatgctcttattcttacatataacagaataatttttatatgatcaagtctccacaaattctcagttttattaaaaataaagcagaagggaaggcgctaaatttaacttttattcattgaacattatttctgtactactccttcttataggatcaatacatgtaaaacaaaatactctcttcttgtctgcctaagttagcaagtatcttattctttcttataaactcctttgcttccttaggcatgataaacatctcctataatgcaattgcaacataatttttccatgttgaactttctaaatccaaggagctgaacatgttttttaattactttgaataattattttcataaattataaattatcaatttttgctcaaagttaataagaaaacaactttaaaagttctcttaaaaaaagaaacttcaagagttgtcaactcttatttgatcaacaacagccttaagtgaccaatgtgtgtctggagaagaaactctgtcaaagccccctgttttaaattggaaattcggaggttcaggcacaatcttgtgttaactgaactagggcataatagccacgaactgggcagaagccaaattttgtggtattgagcatgacaaccatcacacatttcctttgctttcaggaggcaccctaacgtgagcaagaaaattacttctgaaaagcaaaggactcacgcaatacacatgggtagtccagtaacaagaaccacccaaaaatgcatacagccaacctggagacaaagaaatctgcagaaacctgcagcctcctatcagataaagacgtatgctgaatcccaatgatgaagtttgctattaaattctcatttacaaatctacatatgcttgctgcccctttttctaatcattgcaatatataaatatttcttctctcatcctggctctgaaagatctacaatttctattttcatttttgccataggtagtagcggaatattgccacagggtggtacaccacgcatagttaacagaaagcttccgtaattcatgtgacagttgagttatacccttttttcagcttcacttaaccaagaggcatcagaacaactggcagctctctgggtgattaaaattaaaacaaaaccttaaatcgtgcaagtccgctaatctcatattatgcgtaactgtattataccttgcaagctttgttacattgttcatccttttggcaatttccaaaaacaaaactaaacaaacaaactaaaattaggaagcaaaatgcaaagaggaaacttataaagaatatacaccatactaactaaactatatagaaatagctaagttgtattgacaattcacagaaatgccggttaggtactatcataaagagaatgaatatatctgtatctatgtgataacatacccgtctactgacccatctaattgcatgacctacaataataacagcatatggtaagtggtttaatatatgatttctatgttactattaaatatttatattgttaatattaatctcagaactaataagttgatgtacctcctttttaagataaataaccaaaatcaggtttcaattttgggtttcacaaaacaacccctctttttcctaggaggttttcggcaaactgaactgaactatttcaggaataaaaaagggaaacaataaatattcatagcttaaaaatagatgccaggtaattttaggctaaatatgtaataaagcaatgttatttgtagcaggtgaggacaatggaacaactcatcaatattttttcatattgatttttagttccattgttgaaaataagtggcaataggtgtagtgactaaagcatttatctgaaacactgggtcgatggaagaataaacttagaactatttgttctgctatttattcctttagcctgttctgcagatcaactgggatggctattgcccttcagttttctttgaatcctcattccttttattgtatagggtgaaaaaaaagaaaaataaaatgtgggtttgcctcctgttagaaaaagagaggcagcacctgctcagaacttcaataggcacagctaagtcttaacagcaaattggtaaatgaatcctctgcagttggttaggtcctagccaaaggtaagtactttttctattagggtacacttccagaaatgttggtgcaccttagatgattgaaagtcagcttacttttcagagaggatattgcctcttttgtaagttgactgaagtgaaatgagcaggctaacttaagtctcacccagttgtgtcagggaagttgcaactcatagcttagcttgcctcaaatgctatttcttagcatgggtattagcactagaagccataggtatgtataattcatgcctcttttactgtctaatgttctgaagttaaaaactgggcaaaaaagacagcagttactgtctataatacatcttaggctcatactctagaggatactaaagattcaagtttctattcctgcaatatacttaagaactgtgtcctttcagaatcaagctctttgaaaaacattaagagctcattagtaatccatgtcaggtatggctgctcagcttgcaaacagagtttacttcagtagagtatacattacgtttcaatggtcagtgcaggtttgaggtcaacatttaataaacttttcatctcagggagttggctgctggggttttagaatcctacctctctcacaggacctgccaagatagcctgttccggaacaatcacagacatatctgttccacccatccctgcacatgccattgtttttgcaagggttgctaaggcacggttttgctgtttcctttgagcaggaaggcttcactccagcagtactttgaacttcagccatttgccggatatctttgctttggccatcgatgaacaaatccctgatgcagcccacgtagccatagttgagcagagcagtccacacctcggtggggaagacaaggccagctttattttctggcagcccccccaggtacaactcatcatccaggtccagaatctcactctcaccaggagcagtgtagggagtacgcaacgtgttgacagaaatggtacctatttcaaagagaggagaatgcacaggtctttaaaaagcaccaacgtgttataattatctttctctctttcgtctgcttgatggttaactccttggaggcagacaattattattattctttctgtcctcactttttggtatttcctagagaaattaagatatctgtggtattaagaaactttagaaataaaacagactaaatggttccatttgaactcgagaatggaaacctaagtgtacagccaacaaatagtgtttgagagcctcaaacagttcagtcaatgcatgtatacatacattaaaaataaagaaactgtaattctgtatcagtctctagaagaaagtcagattcccctgggttagtgcttgttttcaaagccaatattcaattgcaatccaaagaaagatttcatgttcctattttaactgacttgattactttgattgagcacaatagtttcacagattacctatgtcaaaacctgacttcatcactcctagctgtataaacctattgattaacttacatagttttgtttcccttactcataatatgcgcataataatattacctaccttatagagttgctcttagtgttaaacaaaataatactagtaatgtacatggtttataataatcactgtataaatgtttgtgattatatttcagtgaaagaatcaagtaaaaccaattgcttccttatttgtaaaccaagctagttatttatttaaattaacaaggctttctttttctcactccaaatgttaaggagaaaaatctattggtttataaatacaagggctctaagtcctaagtatggaataaccaggtattcatctacatgggatcatttgagggtcacagaaaaatattagtggaatctatgaaaaaaaaagaaagatataaagcatattcctgatcaaaacgtgcatacacactgtcagattaccaaaattccactgatactttatcttcagaaagacctttgtacaaatgcaaccatgatacctgaacagaacaccacaaggacccacaaccacattatcccagatttatttctcagctccagattataagaaaggataggaagagtctgatgagagagagaggatgagaaaaggtctgatagcatgctggggcatgggtatagaacctcaggtatttagggaagagacacaagagagacctggagatgggaggtgtgatacagaagtaaggacaaaaagaagaagtggagggtaggtcaggtgtgtgtagggagacacattttagttgctacacagaataccaaaagcccgccccaagtgaaaacacatatctaactaaggatgtaaggctgtgggccctgatgtgcccaggagtattccaaatcccagcagaagggcccccttcaatctaggcagtctaatgggatctgtctttgtcagggagaagggcatggaagccactgacaaagactgctcaggtggccgagtcattaagaggatatttggctctctagactttcagagaaagaaaagggaaaagctcctaggggagaaacactcaaaggcattgctattttggccttccaatgaggggagcaaaatagagatttcctagggaagcagctaaaagagaaaaggacaaagtattcatttttactgttcacatttgtacaagtgtctagaagaaaactctcatttaggaacatatgggaaccataaaatcctatttagaaaaatataaagcatggcattttggggaaataaaatttataatattgaaagagaatggtggctcttttctatttcaaatggaacgatcattacacgcattttaaagcatcattttttatatagccctattcaaaatacctaagaagcgaataaacagatggtccctatcctctgcagtagctaatgaaagttagaatatgatgagaaagagtgtcttttaatgacaaaaggaaaggtggacactttaaaaagcacatattatcatggaaagcaaagagttacatgcaatgaacaaagtgccatgttctttttttttttctttctgagacagagtcttactctgtcacacaagctggagtgcagtggcaggatcttggctcactacaacctctgccacctgctttaagcaactctcatgccgcagcctcccaagtagctgggattacaggtgtacgccatcacagccaactaatttttgtattttcagtagagatggagttttgcaatgttggccaggttggtcttgaattcatggcctcaagtgatccacccaccttggcctcccaaagtgctgggattacaggcgtgagccaccacacccagccaaagtgacatgttcttaaataaaagagagaaggattctactctattttccaattagttcaataaggcctcctaaaagccgtagaatttttgaggatttgacgaaatgaatatccactattgagaaattgagaagaaatgttaggagacacggaacttagcaaaggaacaatgacaaattattccaagtgtggtgatatattcaaatatacatatatataaacatatatgtatgtatgtattcccatatgctctttttattcagctcagatggggaaaaaagccctgggaaaggctgtactgtccttgctcagggtatcgtaattctgacactaagaggactcctggaggactcctgagtcgaggaaattcattggcttccacaacccactttctccctctattccatgtagtttccataccttggtgcactgtgtctgcactcactctaaggggcaaaacggctgccaggtggtttagacaatcattcattacagtttgtctgacagtaaggatggagtaactgtgtctcttgatttttatttatggtgtgttagtgcttgctttgagcaaagtattgtaagagagttcaaataagttattttaagaatgtgcttgatgatatggacagggtaagattcttactacaaatttatcattagacttgagttttctgaacacggtcatagagaccacaattttcaaatatcccagtgcacacttaaacacacatccacccacccacccacacccacacacacactctgaaacaaatgtttaaaagaaaaaaaaaatattcaactctacagcctctgaagcactttgatattttctctctcatcatatcattttattaaaacaaatgctggaccatcaatggattttagcaccagctaaaatgttgtaacccatggtacaaaaaaataaataaaaaacaaaaacagatttaagggttactatcataaagagtaagtttctcccatagttccctattgtccctttgagagacaattgtagagttctcatagaaagaacaagcaggccaggcgtggtggctcatgcctgtaatcccagcactttgggagaccaaggcgggtggatcacctgaggtcaggagttcgagaccagcctgaccaacatggagaaaccccatctctactaaaaatacaaaattagccgggcacggtggtgcatgcctgtaatctcagctactcgggaggctgaggcaggagaatcgcttgaacctgggaggcagaggttgcggtgagccgagatcacgccattgcactccagcctgggcaaccagagcaaaactccatcagaaagaaagaaagagagagagagagagatagagaacaagcaacaaaacatgagacagaaagaaaaagggatataatcctacctttaattcaaatttaatccaagaaagactagaacttaaattgagctctggattcaaagttaaggagacacatcaggcaaatggatggatcagatatcagtcattggaatattatgcaaacagacatcataggatgaagaaaatagggctgaaaatcaagtactactttatctatatgctttgctaattcgtatgaacttgtattttagaaaatctttgtaaaagagatggcaaataatcagaaagtaaagaatttagttcaagtgggatggaaacaattatttttatattttgaaaattcatggagtaaaaatggttagaattaataattaaattttattactgagacaaatgcaaatagaagtttatattttagcctaaacatgtgtcctgaaatagacacatttccaataagggatttgaatcccagacctccttaatgacttttactatggatatgaatcaaagaacatattcacctagcaaaagagtcatcacagaatccgaattagtttaaaccaatttaactcatagatatgagcatagtgaaatttaaatattaaggttcccgtgtgcttattttattaaaattgagttataaaatcagtggttacaaagaacacatcaaattaatatttaaacctggttcattgataattgaagacaattgagtagttgccaaactctatatatcaatggaaaaggagaattttcaaaggctgaggtacataaatgttataaatacatttttaagagaaaacaaaaatctaaatatattaatgggtcatccctctatctttttccaggaaccacaaatactgacatgttcttttttaaatagtttgattccttcatacattctaccccttctactgaatttatatttgcagtttctggtaaattaacaaaatattttatgtaaacattgttacattaaggctcctaaaattggggaaaagttcatatttgagaaattatctagatcagggtttcatgcttcactatttaagaatctgaagcaccctgctatgctattttattttttaaaggaatgagatcgcaactaaaaataaattatttgtggacatacaacttttataattttaatgtagaaacgacattacattatattcttacatgtaaagctgttttttcacgacacatgtaagaggtaaaatgaaggtgataagcagacaaggtaatatttaagaatattcataaacaagtaataaatttatgtttcttgtaaaactgtatgcaaaggttcaaaaaactttttaaaacagctcttagttataaaagtggaaatgaaatttacaacgtagtgaggtagtttttcattacctattagtttccattaacttttctatcctatttttattgtctgttctacttccataagattagtttacagggtgagaagaaacacagagtgaaggtgagatttaaaataagttaagttgatgtcaagagttaaattacttcacaagtttaaattactaggaaatgaggagtagaaaatagtgtgctgtaatagggaaccctttttcctggtgagaaaatccgatgttccagctcttcaactaactagctagcaagtttagccaaaggatagatctgttaggcttcaatgtggctcttatgaaaaataaagaaattcagtagatggattattaagattcatttttgaataaacaatctttaaattactgcttaaatgaattgtttaaattaatgtcaattttatctatacttaattctgctccacctgtccctacacaaatgaatcagatttcacaaagttacaaatttacttgtcaaattcctagtctaataacaaattcaaacttgatgaaatatgcacaacataagtaataaaaacagaatacaacattgacaatagggtataatgtaaaatgtaaaatatataattatcataaaataattttaaaaaagaaccaacatattaagagtgggtatttggtgacagtgtaattatgagtgttatttaaaaaatttctgtatcttttttaaaaccaatgttatctatgaggtttttaaagaaataaaattaactgtatttgaaaacaaaacaaaaataccatcttaatattccactctctgcttattaccatctgttttctgcttacttgattcatctgtgagctgggaacttcaggaattaaatcaatatatgaaaacagaactctaatgacaaaaatttaaaagtttaataatgtctggtattggcaagaataagggggaaagggcacttcaataactgtagataagaatgtaaattgaaacagcagttagtaaactaacctgtcattgtctttcaaaattaaaattacaattaatccagcaatcccaattctcacattcaatcctagagatattctgaccaatatacacaaagatttcatgtatgaaggaattatctataaactagtttaaaacagtgaaggtttaaaaaagtaaaaattcaaatgttcttccatagagaaatgcctaaatatcagtatgttcaaactaaggtatgtatggtgtcactacaaagaatggcacagaaaaagctatctttaagtttttttgttacacagtaattggtaaactataatcttgactatagaaaaaaggctgtataagtattttatgtgtgtgaacatatttatagatatattgatgcctagaagaagaactgggaatttttcaacgccaaattattttagtggttatctatggagaacagagtaaattgatgagggaatgtatggtaaggggaaacgcttcacttagctagtttttgaattgcctgaacgtgttcaccaaaagtatgtatttatatattaaatacatcatgcattacaaaaatgcacatatataaacacacatacacattcacagcaatgtatagacacatatacattttaaacatgatcatacacaatggaaggttgtaaatatcaatcaaataacattctgcagcaattgaaatattattttgcagaagttccacagatttccactcagcattccacagtaagggtcactaggtccgcgtgtggtcagtaaactgcctatcttcttagggtgctactgatgccatagtccagagtctgccccttagctaggcaagcccaatgaagagatttggtagattttcagagggcggtttcatttcccaggtttgactgatatttactaactccataacagcaatgtataaaacaagaatgccaagttattgatttcctctgaggaattacctattacaggacatgaaatacttcccatgtagctctgccaatatggatgtcaattataatcaaatattacttattcatttatgatgagaaatttacttgttacaggaatgtgaatactcatatgcattcctcagtatctgtggaaattggttccaggatctcctggagacaccaaaatctgtggatacttgagttcctgatacaaaatggcttagtatttgcatataacctatgcacatcctcccatgtactttaaatcatctctaaactacttatatctaatacaatgtaaatgctacatagttattatactgcattgtttaagaaacaatgacaagaaaaaatgtctgtatatattcagagcagactcaatttttttccaattattttcaatccatagttgattgaatccacagatgcaaaacccacaaaaaatggggggccgggccgactgtatacataactggtctattttctccctccactctaatcagacttacaatgggaactaaatcttaatcaaaagagtgcatggggaacatggattctgaacaagaagaatgcatgagataaggaaatgtatagtaatattggcctgggaaggcttgacacccttatctcagttaaatgacctgcctccatctttacagtggggatgaagttgtcaagttcgctaagcagtgttcagaagattactgctaatatttgcccctgtgagtttcttttctttagatatgttaatacatttaagttctacaagcccaggggcctagctcaggtacttctgaaaagctctgctctgaatctttgcttatgattccataattcccagaaaataaattttgctacttagatgatcttgagcaaaagagtacataacaccatattaaacagatagcctgaaaaattatgtttatactctaactgcaactatataaaatatatataatgttaacaaaaactgaaggaaaatgtacaaatataaaaaatactttgagtgtggagaaacaataaatgatttttttctataaacttcttcagaataaataaatataaacattttaataaaacttaacattacaattttaagcaaaattgaccccatctggtcatatgatcaaagaactagtaaattattggtaaggtatttcggtgtttcctctgatgaatagtggtttatgggtgtggatatgaaacaaaatataaatgcacttaaaattacttcaatgtatataacaggctactaggcagaggcatgggaggaacatttacagtcagagggcaagttcaaacaagacctaagcagagaaattgtctaatggttgctcaagtagaaatgtttaagtgtggtgattcatgaatggtgtacacagaaatcagtgctggtaatagatagctagaaagtgctgttcacatcaaacagtgattactataaacctctaattatgtgctcttgagagagccttgtacctttcccactgtaatatctagttcttaaactggaactctacgacttcaattcaaatctcaatggcttcttagctgttaaatgtaggcttacccatgaataaccgctgacacaatcagctgtaccctgctgtatacaagccaactttgacaagaataatgagttttctctttgatttcaatgtgtaatgatggtttacaaaataaataaataaataaataaaataagactggcagtttgctataaaaatacttgagagggtactttgactgagccagagtttaacacaaatttaaacaatatttgtgccccaagaaaacaatcattaacctcatcctaattgtagctccattcacagtttagctaaatacctgggcagctgttttgtgttgagggtgggaccagagaagaggcaaaggggaagtctggaaagagagagactggtttaaaaacaacaacaacaacaaaaacgctcagctgtaagtcctgcaaaaattgcaaagtaatgggcctcttcaatcatatttattaagtccactgacttaggggttttgccctgttagtagctaagttatccacagaggttatttacattttgcagcactgaagtcatccactctgattcactaaatcatgcctgcacttggtatggtttctcctttgctagcttactgcaggatctggaagtgccatttacggctcagcccacttggctttccatgtccctgaccctttagtgagcaggcagtggaagaaagctgcactgcacataaagaacagctatagccaagcagaattagtcaaactgtggaaattagagtgaattttccccatgtctcagattggaagaaggaacatatgttagaaataaccagttacaatcagttttgccaaaatgagaaagttttagaaaattacacataaaggtgttatttctcattgaataaggggttcatatacccctttcagtgaactaaagaccaaagaaccaaagggaaggccaccaaaaagatggacatcctaggttcttgtcaagagcacacttactgtggttgcatatcccagtcctcagaaaggagttaccaccttccttcttgatggattttcctgctccctaaatgtctgcaaaatgatatagggacctcaagaccaagaagggacagaagtcctgttctcataaaaacttgtcatttttgtaccaggtttacacattcgctaacaattatttaactttctcagtggcttatttcaaacatctgggcttggaggatggtgttgcattcacaagagaacaccagtttttatcctatatcatataaactgctttcagaaagtaatgtaatttaaataaatgcttacagttaaaaaagttgcatttacaattaaaagagtgccattattctccaaatgtaaaaaatgatgctgctaatttattttattttatttttttttagagtatcaggggttgtttggcactgtactacttacatgtttttaatctttagtttttcttataccaaatatatactgaacaactgctatacccaggaatgtactagaaactgtggataaaaaaataaatacaattttctctatctgggatggaaattatgaaccttataaagtgggtaatattaaaattaaatcatttgtgtccaccaaatatgattttaaccctctctctatccaaaaataaccactacttagattggcagcaaattaatgaccataatggtctcattatatttctatttactttagtatggccaacagcagaaagaattgctcttaggcgtgggttccctctactttaataacagagataataaggcttttaaaatactgagctaaggaatattccaggcaaatcaacagatatggcctcattatctgtatgtcagaaaggagcccatgttaccctcttgtcatagcagtacactttctccacattatatgaaaaataatattcatatagcccctgaatataactgatataaaaaatgggtaaaataaattatttcatgaaatttccatgtttcttagttgtaagtgacctctgaatcttactgtttcaccagccaaatcagaaatatcctttaagtaaaataaaagcaagtatagccattcattcaatttttaaaaggctactccataccaaaccaatgcagtgtgcaaatatggaacttaattaaaatactatatataaaatattaacagctgctattaaaattacattaaacacccttgagctaggctaacctaatatgagctctattttttttcaatttaataaaggacagaacttggcttagtgaatgaactttggtttttatattgtttgtaccaattcactaatctgaaattttaatcacataaaagtactttaccatcacaacagcaccaagcatagtaatctgatctttccactggattcaaagaaaaatctcatgcttcgtttattttctttcttagatgcaaacaacacttccttagaacgtgtttctgttcttcccatacagaattgagctttgtaaattaaagtagatatcatctaattttgaccttctccaatgagggtacaaatagagtaattaataaactcttggtaatttggatgaattaaagagcttaaacagaaaaagtagattttattctgcttgaagattaaagtatttatctgataattaattagattgcatcaatactttctccttataataagaaacctcataaaatattcaaaataattttgttctctgtgagtatgtgtatatgtgcatgtgtggcatgtatgtacatatgcatatatatacatacatatacacatatacatgtagagagagacatgcacacatatatagacacacacacaatttacatagaagaaagactggaaagaaatacccaaaaatataaatcattattttcaaatgaataatgaatactttcctttttcttttatattattttgtatttactagtattttgaattaatcgtgtattacattcatatagttagaaaattcctcatttctaagtgaatgaaaagcaattgatttgatgtttggtgttttttttctcctctgaactttcagaagataaccgtctaatctgatatgggttgttttgtgttgttttgttgttttgagacaaggtcttgctctgttgcccaggctggagtgcaatggtatgatcacggctcactgcagcctggaactcttgggctcaagtgatcctaagtgtggggattacaggtgtgaaccactatttttggcatgttttgttttaaagtgctataaaatctgacttaaaatatctcttcttgaaagtaattttcaaaattttattctagatctatcttaagtcaaattataacatccacaagctaatatttcaaagcactacataagcccatgcccacgccacttcaaaattcttctgcttgaaagttcatatgtaccaaattaactgctatctctggcagagataggctggaggaagtcagaggggaacactctattattattgttatatttttgcattcccatcaatgaactcttctcagcttatttttatttttattttttatttttttttatttttgagacagtctcactctatctcccaggctggagtgccgcggcccgatctcggctcactgcaaaatccgcctcccagcttcatgccattctcctgcctcagcctcccgagtggctgggactacaggcaccgccaccacgcccgactaatttttttgtatttttagtagagacggggtttcaccatgttagccaggatggtctggatctcctgacctcgtgatctgcctgccttggcctcccaaagtgctgggattacgggcgtgagccaccgcgcccagcctcttctcagcttaaatcagaaagaagaggaggaggaagaggaagaggaagaggaagaggaagaggaagaggaagaagaagaagaagaagaagaagaggaggaggaggaggaggaggaggaggagggagggggagggggagggggagggggaggaagaaaaaatggtaattcaattccttgtagacttctttaggaaagtgagaatatttagggagacaaagtttccagagaggaatgaatcagaaacacagtctccaatatatctgggaatcagagtaatgggttctgaccttccttctctccacactcactcccaactccttctcaatttccatatattctatttctttattttgttaggtaaaaaacatatttccaaacaggcaaacacaatcttcttgatctataaacagcagaataaaaaaggaaggataagagggaagtagaaaatagttcagctgggagttaacaagtactgagggagcccatgcaaggagggtatgagcaagagagttcagccccaggtcttcaacagggcccttctgaaagaccatggttatcacagattactgagtctaaaagaagcactcagcttagttggttgggggtgggtgaagtaaagaaggagagtagataggtctaaatttagttatcttctattataagatcatttgatttatgtatgagtaggacaatcagagcatgggagcccggggtgaagggaattaaataaatgtagttgtatacttaaaacagatttctctctccttatctctccctgtctgtctgcctctttctccctctcttctctctctctctcttcctccctccttccctctctttctcaggattcctacaaatgtcatctctgcttcctggatgattatttcccctcaaagctcatattagtcaacatcctaagccccctaaaacactcccaaatttcagtgtaaatgtgatttcttcggagaaactttacctgccacctttacccctcctctcttagagaaataaaatgcagcaacaggaagcagaatgtttgctggtggaattccaaatacctttcatcagaaagggaagcagtttggaagggcagcagagctttgccactgtccttgaaatgctactgtattgattaaagtgtttttaatgccatagactcatcctaaagtgtgacgtgccaaactaaggattttatgtttggatcattctaatttttttttcatattttatatttgccacttcgggtacctccaaacatccaataacataagagaaaactgggaatagaaaaactttgaattttttcacttgcaaattcaagacaaaattttctgcaagatttggcacttgattacccaataaaagttcatttaagaagctattttagaagacatttgagcatttggggtttgatgcccaactatgataattaattagctctttctttcatggtgtgaaacagaagcaatatcaggcaatttcttttaggctaaagaaacaaatgcaggaagtctttaatatgtcttggttttcacttttaggaatggcatgggtgggtggggtgctccagcagataaacagcatagaaaaatgataagattacctgaccgtccgtctctctggaagtccacatgataccattctccatcattcactttcttcaacagggcttttatttttatagtacctgaccccatgtccaggaggaggtagaggtggccatctagcatctcaatagcaaagaagtccacctttatcatctgtgggtgcttggcatctttctgatgtcttggcttgccatggctaaataagatgaggccatttggctctgttgtacggaaatcaaatgatatggagccagttttctttgcattccatttaggcaaagagatgaaagactctggggtttcaaaggtgattgggtctaaagttgcaacattctcacatttaaatgccaccactccatggatcttcatcttaggatctccttgcttggcaagtcgagataattccagcctcacatcattatttttatatacaacctgtgggcagaggatagcagtgagaaactagcctccatattttaatatctgaaacttgtgaacagctcatgtaactttcaacgacatcataaaaaggcacacgatatttagttaattttgttgtataaaggcaacatttctcaggcaaataaaattcaagtgtcaattcatagaacaataaccataacaacttaacttgattcaaataatgtgtgtgcagatgcacccgcgcatgtgcatatacacacaaactgcttgtatttaactcaaataatttaaaaatctgcatatatctttaatttcatgtctacattaccatgctaagacttgaacttataaaagctacttgtttcatagttgtctatgatatttttaaaattaaatataagcactgaggttattcagttttcccatcattaaagcatttgaaattggataccattatataccagtcccctaaaatattggatctcttctattatctatatatctgctgtggatattgactttgcaagacagtcacaacaagttaaagcacaaaacagcctgacatttctcagaaaaaaaatatataactaagatacagaagatccctgacctgcatcaatacctttgaatactgttaagtaatgtggcactgccacatgtagaatatggtgcttcccctcaatttattcaacctgtgttactggtgatccatttcacttttaatttacacaaatgctgcgcaagggttgtcttgtactctcattttccaaggcacttcagtgaaagaggctaggcacttctgagtgcttactgatggtcctaaggctttttggattccaattaacacatttgataattcactgacagggttcacggtatcatacatttgctatcccttcacgctaataaattcaaaggtattttgacataaggataaagagagaaggacaccttttctctacaaaatgcatacagtggataatcacatttctaaaatacatagaccatacttacttgagggtgaattagttatctaggtccacatagctgtctaggctctttcaagaagggactctatagatttcaaagctcccaacattgctagactctagatttatttatccacatgtaaaaatgtacatatatatatatgtatatgtatacacacatgtatgttttgtttttcatttttcaggaatggcatgggtgttttatataatatatgtaacaggaaaaataagacagcctgtatctgattagcgctatgaagtcaaccaagacaacgcagcagttattccaaacccatggccaactgaaccaagagatggctgatgagtttcctgataggatttgttaatgaatactttatttttcagagtaattaagagtacatgctctggtattggacttcctgagttcaaattctggctccagcattaccgaactgggaaatctctgtaagcctgtttcactccctgaaaggaaaataatacttcacataatggttataacaattaaataagaaaatacacataagtgggaaaatctacataaaggcattcattccaatgccaatcacattgtaagatttcaataaatattaactacgtaaaatacatgataataaaaatcaatgctttatcatctaatagacacagattttaattctaaatttatccataggaaaacatttagaaataaagcccacacatataattggtttttatacatgatttgtgccaactaaataagtcacatctttccaatgctgggcctggtgtttcagtttacctttatcttggagaaggattataataaagaacatgatatcccttattctttgaacaaatatgtacaatggtttaacaagcatctattgacaacaaaagaagagaaaatgaacttgagcaataacaaaaaggaattacattaattcttaagaatacttttttgaaaagagaaagatctattaagtcttagaaaaatttatttaggattgcctttctttggagatctttagaggcagggaaaatgcttttcaaggatgattttccaagttttatcgcttctctctatgactttcatgctacttaaacctatattatttttcctttttcctattgatttatattccagcatgtggacattcttttgacatagatattgatcaagaataagtattttcagacccaaatgatgcttctcttgatcaatgctaacactcattcttataatagaaccactgtaaaagaattgagtgtttctgacatgaacaagtgggttttagccctggtatattgtctcttgaatctgacatcagccaccacaaagttgaagaatgaggggcagtctaagtctgggcaaggatttcaatgagacataatcttataactgaatcaggtgacttggtgatgaaaaggttcaggaagatgtaaaaaaaatagaagtagggataattccctgggcaaaatttcttaaggttagccatgcatctctcataaaaaaaagtatctccaccagaatcaatgctttatatgctttacactggcaagaaccttgctcaccacagcgcagcaccaagatcagtggctggcacagagtagatgctcaataaatatttgtttatagttgaacaaaattcttccttcacctttttaaacctagtttctagattataggcttttgtaaataacaatatttagacctataattaaaatacagcagaatatggtattgcggaccaatctcataaactaattactattttgccctatttctctagaaaaaagcataaacttatgtgcatatccagttcataattgacaagttggcccatgcattgggaaatttcatcttcacacacattttgtggggtataaattccttttagaacgaagaatgcctgagttaaaactctccagaggtttatacacaaaaatatacactgtgcttctcctcaacatagttcttgtaggtaagaactatctccagatacaagaactctttcctacaagaactatcttgagaagaagcacactatgtatttttttcttcccattttgtactctttgaaaggctactccagaaaacagaaaagcaattttgcattggtaggcttacggctctcagatttacactactatttcatctgacccagattttataattaccctatttttctaaagttagacctactcttaaaatgaactgaatctagttcaattagaataatgagtagctagtaagtattctaactcctctaaaaattcatgtgtaagctatttttgcttctttctgaaacaatgtggcactcaatcatgggaacaccttataattattcatatatttttaattcttatgtcaaaagttgcaatttacatgtttcacttttgaacaagtttctatatgctttatcatcataacaattgatgatatttgtgcacactcatttggatctgtttatagaaccaaggtttctttggggacattgattttttttttttttttaaagagtgattcaaaatgttgaattttacttcctcgcttcatgggcttctttcccatttcttcaaatatttgttagaatttttagtgtccctctcatgttaatatgcaagaatagggcgtaatatgtttgtgttttcacattcctagggtttacctttgaggaaaacaatcactgagtattatctttgatcttaatgataatcctgaaaacatgacagcaatgcagagaaaataaataacttaaagaataggagcttagtagtctgcatattaacttggttcaatctcaaagctattactaagccaagtccctaacctctctctgtctcagtttcttaattttggaaactgacatctataaaggaaaggcgtgccataactataaattcttgagctttttttacccttaatatgtgtgatttgggacagacataaaagatggtcgattgttcctgacccctttctggctttctcctgttgcaatttttgatgccaggatattgttctctactttcagatacactgaaacactaatccattagtaaagagagtgttcactgcatcttctcgtacacagacatgcctcgaggattatatctacctaagttttgtacagatggtgctaaagcactggtagctgatagataaggctctttcaacagagcgggagtatgtgaaattcagtgtgaaaatatttgccactcagataatgactttttaaaataaatatgtgcttcagcttggaaattacaatgggggtcttaacttcactaacatgcatgattaagacttttcattacttaactatggtagtatgcaggatggtgaaataagcgaccaaagttagtgttgtttagatatttagactttgttatgaccctccctgagagaacatgaatgactcatattttaatctatcttggttttatctttcatacttgtggctaataaggagtgaggcctaagaatttggttctcaagtcagatttcagagagaattccagctcactcattttcaaacctgtgaccttgtgcaagttcctcaaccttgccaagtctcaagagttttattcgtaaaggacaatggtatctaccacattaaggttactgtaaataataaattgtattttagttaaagtgctaataatgggtcctagcatggagtaagtgatcaagtaaatactcattgtttttattaacattattataaataacatttcttattcttacattgaattgatggagctacacaatttaattgtcataacaaaggtaacagctaagaaggtagatagcaattgattggtcacatatttaagggaattaaatagtgctgagaccagcaggatcaaaggtattcagcagactggggcttcctttttcatgctgatatttacgttgcagttggatgtacacatcaggctttctctgtaaaattccttaactagaaaatatacacagcaggctagctaacctaggagttgtattttcacccatgaaagggtttctgtggtatctaacaacagcggctaccactatcaccaaagccaccacaacaatcagttaagatttaccagttcactttctggcaggccctcttataagagttttatatatagtaatgtgtttaattcccatatgcatcctagaaaataggtataattatttcctattaccataagttacctagaaaataggtaacattattctactttatcaataaatatctggaggcacagagtgactgcatgtctttcttcatgatcatgtctaatcctgtttgaatacctaatgaccttaacctcaaactttatctttgtttcagtaggaaatttgtcttcgtttttgatagcagttgctaagtagattcacaatcaaacagctgtttgtcattaggcaaaatgataacctttcaatgagttacatgtgcgttctaaataccagtatttttccttcatttgttgtcattaaaatatctctaagtgaatcaaatgtcacaagtaagtagaggaatttattgtgtatctactgattaaaatgtcccttcaagtccagttatagcagagggcctatttctgtttccaagatgatattgtagtttttcaacaggtatgtcatttagaatgtaacaaacgttatcttaaaaatctgtgcggtttaaaaattatttaaagggactgttgctttaatgctgatttttgtttgtttatttgtttaaaatgcagttaatgcttttactctattaagaccaagtgaaggccgagcgcagtggctcaggcctgtaatcccagcactttgggaggccgaggagggcggatcatggaggagggcggatcacgaggtcaggagatcgagatagagaccatcctggctaacacggtgaaaccctatctctactaaaaatacagaaaattagccgggtgtggtggcgggcacctgtagtcccagctacttgggaggctgaggcaggagaagggtgtgaacctgggaggcagaccttgcagtgagccgagatcgcaccactgcactccagcctgggtgacagagtgagactccgtctcaaaaaataaataaataaataaataaatatcaagtgaaaatatttatttcaagtaccagaatttaattatcattttcacctagctgttatctttctacgcaccatctccttatatcagtgcactgtgtcaaaatacaaccaggaactagccagcaagtgaaaagtacaagcgtcatccagtaagtagcagataaattgcatttgctttgccatgatctgggtaagaaagagctcagaaaaggaaatgcagcatattacaactttcatccccaacattaacttatttattattttgaaattatgtttcaattctgacacttccaattcaatcagacacgcactttttagacacgtgctatggtaggatcaatcaaatgcaattttagtcacttccctgtgcatatgcctagttccacagaacatgttacactgaaaataaactaatttaatacgctagtttaatttatcttaaacatttgctagtggtaactatataataggtaaactatatgtgatcaacacatatacacatagacacacacctacacacaaccagagtttaaacattacccagatacactatatgtcaaatttaatgtcattgatatccatataaatatgcacttatgttagaatatatggtatatctctcaacagatatatagataagtagataatacatacctatgtatgtcagagacataacaaaatataaatacattaacaatatttgataatttcaaaaaattagaaatttgaaaatttcaaaaattagaaatttggtttaagcacaaagatggtcctactcattttgtatcaaaaatgttttggcccaaaagcaaattttagcacatataaagttggtgctttccacaaaaaacaactgtagcctccaaaaattagtattttatgattaaatgaaaggagaaaattagacatttcccttcatgttcctgccaccatgaggagacaatctgaaaagcagaataaaggcaaggtggtcactttttaaaatctttgcacccattattgttttatctcccacccaaaatcaagtttcttatgctattcactttcttacactgaaggtctagcataggacatgattctagcaaaaatgtcaaacactgttgagcttaactgaccaagagagactaataggattttagcttttctgggaatgtcactccatagaaattttcatgtgtagtgtgatatgtccacaggagacaggtgggcatccagtacagtacctacaactgtggagtggctgcgggagggctagtggatagggaagacagtgtagaaaatgaacaagccctgtacaaagtagtctgatgtatgtttatttatttatttatttatttatttatttacttagaagccgtctcactccgtcgcccaggctggagtgcaataatgcaactatgcaacctctgctgcccaggtacaagcaattctcctgcctcagcctctggagtagctgggactacaggcatgtgctaccacgcccggttaattttggatttttagtagagacggggtttcaccattttggccaggctagtctcgaactcctgacctcaagtgatccgcctgctttggcctcccaaactaatgcatctttaaaaacaattcttaccagtaaggaaatttaattttaaagagacatacgtaaataattttgaaaaataagagtgttttgggaaggcagcaagttgatctttttttcccctgatctaatctgattcagagaccatgtacagataatattttcaataaaatatgttatcttctccaaacccaaataccaaaacctgttataaaatggaaatcaaactacagtaatataatttatccacaaaggcatatgacattttatttaaaacaaaaaaatagttaaaaattggagagggaaaaaacaatattttgtttacacaacaaagagaaaaatatttttacctagtctcaattaaatacaaccaaatatatcccattaatcaggggaagaaaaaggaaaagaaaacccctcctgctttgtccttccttcattccagcattcagtgaactgcttaaagttactgagacaacattaggtgcaatctgtagaagttattcatgggagttgaaagactgagttgtccttgggttagcagctctatttatgaagctttcagtgcatatgagtatgtagcagaataacctgagtttcattaaatagttatgtctatttttctcacattagtgattcagtaatgccttttggaaataaatggaaaaatgaaccacaaatgtcagtaatgtgaagtttcagctgaagatctttttgaaatacaaactgcaaacttgatcaattgtcttattttcagatgaggaaactgaggcttaaaaggctagaaggctatccaagttggcatcaatctctgatcaaaataatgtattggggacttcagtgttcagtgttctttcaattttgtgttaaaaaagaaaaaagaacaaggaacaaactctgccataggtccagggttatgaaatgctcttaagcaattacaaacgaagagcagcccactttttagcaacgtgacagaaaaggaactggagcttatttaaaggtgactccaactttaaaactatgttagcttcataataagttgattttcacagacagatataaaagtcctgagggggtaaaaattgcagtaatttcccccaatgatagcatttagaaagacactgaacaagttaactagaatcaataaacttgcaatgttcactactattttaaaaggaagtgatgaagatactttccgcatcagtctttcatgatcttgccgaaagttatctcaccataacttggggttaagagtttctacttcaagccagcagatgctgctaagaaaggcaatgcatgtctgctttatccaaaaaacttttcaatctcctgctagtttcaatgggggaaaagtagcactattattattattttattaggggaacctatcttcccatataccaagaaaatatctttgaactgataataacaaaatagtgacactaaatgatgtgtctagattaatcaatgcatcttcttttgtgtctccagcctcataagctcagtgaagtttcctccaccacttaattttacatttttctaaggaggcagacattagtataagtatataatataccatttagtatatgtatatgcatgtattatagatagattagacaaatatatgatagatatacgatagatagatagatagatagatagatagatagatgatttcctacagtctgtcctttcctcattgatctgcattgacatactatctattgttttggatataccaatgttcactattttaatatattattactttttgatcatgctcatcaattttaagctttgaaaaaaatttctccaagagagatgggataaccaaacaatttcatgtaaaatatttattacttgattatatttatgtgtgtgtgtatgatatatgtattatttttaatccactgaaaatatgttgtcttctgtttaaggtgaaaatccaaattgacttgctccacaaagagttagttatttgaaccagcacatttttttgtccttctttttcttacttcaacactcaggggaacacaatttttaaataattatttttccgacttgtaaggcctaccacatattaaattattacatatatgagattctatggctgagcacgctgttctgttttattgatgtttattttttcttgatctagttccatgtcacctaactgtcacagctttataatatattctaatgtgtgttaggctccttccaatcaaccaacccattaacattaattagcttacaatgtttatacgttataaacattataaacatctcatgtaatttcgcacgttttttccttatgaagatccgttaataaattaccaaaagatataatcagtttattcacttcaataaaaaaaagcaatcactgaatatttttaaatgaccataacttataaatttttttgtcttctgtattgacaaaataaatatacatcacaagttgctttgatctagctttctaaaacatagcaagttatacattcaaatttacttaaggggactttagaatagcccaaggaaattatatcttgctttgaattacattcctattattacaattatttgcaaagttataacgcataaatgagtttgacaattttatcatatcagagaatctggcctcatgccacaacaataatttattagttggaggatagatatacaactatagagatagattaaatcaggaagaaaacaacaacagtgaatgtagttgtaagtgcgctaattctattccaataaacacaggccctggtagagttccttgtaataaaataccaggagtaggtggccagtatataggagttatctggtaaatgagatgaattattctcagtgaagaagaaagtggagtgacctcagactccactttaatggtggctcttttctagaggtgagggtacttgcctgaggtcacactgctattgttcagagggagtcaacagtggacaagatggaatctgaatgtttgcctccagagcctgaaatggactgtttaatttattggttttctttgtatggacagtttttatgatggttaattttcctaaagcaataaaaaaccataggacttctatgcttcctcaacctgatgtttcaagagctggttatccagttggtggattatccaaactgcatgaatcccctttctttccctggctgcctgcctttactgctcaactgcacatccacctaagagcctgcaaacgaaacaggaaaaggtggcatttaagacagccaatgctgatgatgtttttagcaactgcaatgagaacatttttccaagtagacttgttcctgagaagttgtataagtttgttctgtaattttaatataatttgataaaaacaatgtgttataagatttatatttacatatattcaaacagtctcaggtttacattcctgcattgctacttaactacttttactgccttggccaagttgcttattcttactgaaataatttccctctttatcaaatgagattatgaaaacttattttgcaatgttatttaagcacataagtacttgatcctgggtacctaaataaagggtagtcattactgttgctattatgatcttaactgtgtaaggtcttaagggttaagatcttaaatgggtaagaggggagtgttcattatttaaattagtaagtgactactattgaaagcaaagatgcattctgtaaagtaatcacactcaaatcttgatgttgacaaaaatacttctcaaatttcgtaattttatctcatctctctggaactctacattttgactttatctgctaaacaaatagtatttttaaagtaatattttttattttaaatttattaaaggcatataaatgacagaatgagacagtctgtataatgatattaaattgatggaattatagctggatgcaaatacttgttttatttagcttatactgggtggactaaatatatggccttttctaggtttgctaaaatattgaacacatgtaactgttgttcatttctaactaaaagggccctaaaaagtatagagaccccaggttgagaactgttatttttcaattataactgctaagcagtagggtatttctttttaatctattctttaattatttctttggaaagtcccacatgattcagatgtcagatgggttgtgccttttgccaggggttgcttagttaactgtttatttaatgaatggggttttatgtgctactgaatttctcatggcacacgttagaaaatttttggcagcatttaaattggagaactgagaaacatattggctctacggaagctcaatcagctcccaggcaggtgcagagtttttgccaacaaaaattcagtaaaataaaaaatgcaaagcccaaattctcacacaacccaaagaaaactgactttggtgtccaagattaaatgaatgctagatccaggcagctcaggtagctcaagaatggaaggggaaaatgcgtcataactttaggagagaagcaggaatgggaccttcttgttttggtggatgacagtatgcatacatttttggattgctgagaaaattcaactaactcctaaaaaaaaaagaaaagaaagaaaatagtctcatgtaatttcgcacgtcttttccttatgaagatgtgttaataaattaccaaaagatataatcggtttattcacttcaataaaaaaaaaatcattgaatatttttaaatgaccatagcagtcactgagcatcctagaccaagtatccagatggctatgttttttaaatgatttggccagatatatagacattgtataagcattggttaccagatttatttactctgactgggaaccaaaaaatatcctgacatgtcttctgagttctgaaaagtcctaaatgcacatatatataaaattttactcagtagtacaataggatgagaaaaaacaatggaaaatatttttttttaattaaacactagtttgagaaaataaagatgagaatgtatctttcagcaattaaagtgaatagtaccagcctacttatcattactacatgactctccaaactgtgtggaataaaagccatttgcagtcatctcctcccaagtataactgtcatcaactcctcccgtcaatactctgcccttggccagaccatgtcccagcccttctccctgtctggaagggcaatgtcccgagtcaggcttgttcttgatttctcctctcctagatgtagtttctggcaatactggcttattgaagactcctgcattcttgggacaccagtggatattctttagtatcattttcctgctgtattcagaaatggggagggctgtgctcattagcacagcgatgctgacccgacactaggttggccacctcttggtggctacataaacacacgttcctcacttcaggcctagccaacttggctgtcttctatttcggttgtatgttgaacaagtccccagtagacagttcattagagttggccagctacatccactttgcccctaattgcctttgattagcttctacgttgcctggtataattatttttttttaattgagatggagtctcactctgcacccaggctggagtacagtggcatgatctcagctcactgcaacctccgctgcctgggttcaagagattctcatgcctcagcctcccaagtagctgcaactacaggcacgtgccaccacgcccagctatttttttttttttttttgtatttttaatagatacagggtttcgctatgttggccaggctggtctgaaatgcatgacctctggtgatccgcctgcctcagcctcccaaagtgttgggattacaggcgtgagccaccgtgcccagccatcatgttaatatgaatcattacagcacccaacagcaactgtcaagcaccttctctgtgtcccatgcttgttgaacaacaaacttctacgtctcatgacagtcttatgaagtagacatttttatctccatactaaagctcagagaatttaagtattttgtccaaattacacagtaactaggtgactgagcagggatccaactcagcttttatctagcttgattccaaaatcacagatgcgattctagtgcatgctccccaccccatgggatagtagctgagttcctatttacttattcagccctggttctgggcacactttctcaatctcatcatcatgcctttcgtgtatagaagtaaagggactccttatcccttttctctttttcgaccaagtgcctcattaactagctgtggttctcttaacactgctggtaaaaaataatattaataataataatcccccttaggtttcatcctactctctttctctcttgatgtcaggataattgtttttctcctttctgtcctatgcactctgatttagtgtcacacttgttttgtgctcacttcactcttaggaccaaattaccagactacattttaagaaggtacaaacgttgttttgaatgttaagaattctttaagattttctaagttgccttgtaactggagaataaagaatgaggtttaacactaggatgaataacattcaacacatcagttttcaggggtctagagttagatttgatgattacagcctcctgtagtcaataagagaagagagatgtactaaccacacgtagactgggaccatttttttcattgtaactgatgaagcccaaaacagcagggccagaacttgggtgaggggtcaggtaagtgagatactcactttggaacaaaatataaaggaggatgttaaatctcatatcacgacaaatatttcaatgaaatatttttaaaacttaataagaaaaagtccacaatgaacaaggtattcaaattttaaataaagatatagaatctgatttttccttttgcctcaagctccacaatgctttggtagagccctgcaatacaatattattctaagattaatgaactccatttaatacgttggaaacatatttattaaaacaagtgcaagtaactagaatagtgtgggggtaaatttcatcattagatatcattaaaattagaactagaatgcactactaatttttaaggtgtaattagtcattaaaatcacttttattcaaaaataatgacgaacacagagtgtttagtcagacattcttttaaccactttactcatataatcctcatgacaacctgctgatatagtagaaaaggcccactgctacagaattcccaatgtaatattcattaaaatacaatgtctgtggagctgtgcagcacagtgcctctcataaaattagggtccccatttttcagaagaaactgagctcacatagtaagtaccagaatgaaatttagacccagacagtccagatacagagtgcttgttcctaaccatattatagaaacaaaccaagcctctcaaagatcaagtaatgtagcctatttctacctcaacctctgtgtcactagacctcaaattgcaattaacttttaataataatgatcctaagaaactctccaggacactggactagacaaagatttcttgaataataccccataaacgtaggcaaccaaagcaaaaatggacaaatgggatcacattaagttacaaagcttctgcacagcaaaggaaacaataaacaaagtgaagagacaacccacagaatgggagacgatatctgcaaactatccatctgacaagggattaataccagaacatgcagaagtccaaacaactaaataggaaaaagtctaataatctgattttaaaatgggcaaaagatctgaaaagacatttctcaaaaaaggcatacaaatgtcaaagaggtatatgacaagctgctcaacatcactgatcatcagagcaatgcaaatcaaaactgcaatgagatatcaactcattccagttaaaatgccttttatccaaacacaagcaataacaagtgatggtgagaatgtggtgaaaagggaaacccttgtacactgtttgtgggaatgtaaattagtacaaccactacagagaacagtttggagtttcctcaaaaaaactaaaaatagaactaccatatgatccagcaacccactagtatatatatacctcaaagaaaggaaatcaatatatcaagaatatatctgcattcccatgtttattgaaacactagtcacaatagccaagatttggaagcaacctaagtgtccaccaacagacaaatcaataaggaaaatgtagtatatatacacaatgaataattatttatccataaaaaagaatgggattctgtcatttgtaacaacatggctgaaactggaggtcatattgttaagtgaaataagccaggcatagaaaggcaaacgttgcatgttttcacctatttctgggagctaaaagttaaaacaattgaattcatagagactaaaaggatggataccggggcctgggaagggtagtgggggttgggagaagtggggatggttaatgggaacaaaaatataattagacagaatgaataagttctagtatttgatatcacaacagtgtgactgtagtcaacaataatatattgtacattttaaaataactaaaagagtgtaattggattatctgtaacacaggaaaggataaatgcttgaggtgatgtataccccagttaccttcatgtgatcattaggcattgcatacctgtatcaaaatatcttatgtactccataaacacttagtatgtactcagaaaaattaaaaataaaagaaaataatgaccccaagagtagattctgccataaattttacagaaaccagtcaaaatttgttatatatattatatgtaatataaacacatatgtatgtgtgtataatacatatataatacatatgatgactcgccattgaaataaccttgagagtcactcatactaacttaagaactgcaatccatctctgatattcacccgtctacaggccaaatacagaaactagactaaatacctaaggtatttttataaaattgtgatggatactaattctgcagctcacaggcattgaaaggccaattgaattcagacccctggccctgtcattaacttctgcaggtgtataactggtattcttgtatcagacagccaatgtcatcaaaatggaatacaacaaattgttatataaaacattttagctctccacattaagtagcattataattatatgatgaaaccagagcactgtgaaggattataaaaaagattaaagaattcagaataaacacttgagaccttgtctaatacggatgctctcaagtaactactgttgccaattaacgctgctcatatacatgtggatttctgattatctggtttactactaaattaaagagcaaaaaataaaaaataaaatctctaatgcctctactgtagaatatttctattgatattttggagggatctataagaagccaatatcaaagcaggaatgtcttttagaaacaagatagatcaagcttgtctcttgagaacatgttattctagagaggaagaaggagtaagacatgggctggcagcagagtactgggggcggggggaagaatcaaagacagagaaatccagtggaagtaaagtatacgaggcctttatgctacacaaaatggtgggcatttccatagcactggtacacaggttggtgctgttaatcataccttattaattgctattagtaatctcatttagaattaatttcttataagtatcgtaaatccaataatctgctccttcctccttatgctaacatatcacaagagaaaaattttaccctttgtgaatttagaggtgttttcatgactagatgacttattcaagttagcactttgtgtgaatctttgctttgctgtgtggttgagtggcagaaagcaactgtaagcccaggagctatgttgacatgtgtctcactggtcaaataaggaattagatatgaatgtgtataaattatattaaacccatccagactggaggaaaacaacctatttgataacaaatttataacatggcagtcatgttatatatatataacatagcaatgctcatataatcctgagtcttgttaaaataaagactcaaagtgctgctacagactgtaggatatgatttattttgatatcaaagtgttttccgcagcttggttacctttgtgatttggatcagggaaaggtgtgtaccctatcaccttaccctatgctagatagatgtaaattttccacagaaagaagtggtttgggtagtcactcagttactagattcagctgtttttgaccaagccacaagaaataactcagtaaacaaaaactctttgagaagcaggtctaagtttaaatcccaaatcagaatgcctacactggaggaaaaaatcagtttttactggccatggctttagctataggcccaaggatctgtttcttggagagtctagttgataccaggaaggagatagtagttaaaattaatgcaatataaaatgtttcccacagtgatgcttaagtgaacacaagaacaaccctaatagctgattgcttcagaaaagtaaaatataaatggtcattcagaacaacaggtttgcacaggagaagaaactcagtaagtcacgagtttgaagaattgtattaagtttcctgggtcttaagaagaagtggcttctacattcttagacacaatgaggatgaaaagtttgaggttaaacctgtgtattttcattctctgtcaccttaattactcaaggtctcagtgtatttttgtctagtgtactatctctgtccttgttgtttcttgattctcctacccactgaatctatggctgagcacatttgataagtgtgtagttctgttcagtttcggatctgctaagatatttttaaagtacatagtgagatcataaaatgagatttttttttttggtttgaaaaattttgggggacaaataatatttaaaaactgtcaatgtttccacatttcaacattagatgggaggtgcctaggaaccatagagtatattgcagaaaagcaaataactaaaatgcctcaagggaagttcctgcaacacagagaaaagaaaaccattcagatgcttgggggaaaagcttagaaaaagggaaaaacaaaaagaggcagctggggtggccttcctccccaacagagctgaacctaagaacatccagataaaaccagagtcagaaaatactggtgttggttccacattcatggggaactctgaaagcctctcagagtaatctcgatttttggcagggtactctatcagtcaaggcctaggagtagatgtggtaattgcagaagggagttatattagagaagccccaaagactctggcgggttgcagagaagtcctttgtattttcaggtggacccagagaaaacaggaggactaaggggtcagcagaggtctggagctcacgcaaggagtcttccagaatcttgagcctgaaggcaaccacaaaaccccatgtcctgaagggcatgcacatactgtgcccaaacaaccagccaggtcattttctaatgcttaaaacatgaggtcaataccagacaggtgataaatatgatgctataccaaattctgctgccagaaatcctctccaatgcgctctggataaaaagatatattaataattatactgttttgttttttaatgtctgatctagctccttctgtttttgcaagcatacttcttagtggtttctttcataagaatagacttatttagcccatctaatatatgaatgatttcaaagttaatgttaacaataatagccatcactgattatttccaatatgtaccagtcagtatgcattgcagccattatcattaattgttatatcaattctctgatgtaggctttttctatccccattttcagatatcaaaagttaggtaactttcctgaagctgcacagctagtaataactcattccactgtatcacaccaaattacaacaaatgatttctaacaagtgataaaccctgacaacctctgagaacgaaaaggccagagaattagaagttaataaaacttactttatttttccctattcaacatttgtattcaagattatttattttcttagtggtcaaaacctactaggtactagaatgagggtcaaggtattgagacattttgtttctagtttcagctctttcattaattgtgtgaatttgagcaagtatctttattgctttttcatctgttcagtcaggataacaactgcctcattttactctcagtattatatgtatttctagccttgtcttaattgaaatacaattggataatatgcaatgtacttttacggtgagttaaaaatgcattattatattcacatataaaattatatcagtccaggcatggtggctcatacctgtaatcctagtactttgggaggttggggcaggaggattgcttgagctcaggagttcgagaccagcctaggcaacatagcaaaacctcatctctattaaaaaaatagttggacatggtgatgtgcatctgcagtcccagctactcaggaggctgaggcagaaggatcgcttgagcttgtggggttaaggctgcaatgaaccgtaactgcaccactgcactccagcctgggtgacagagagacactctgtctttaaaaaaaaaaaacggaatctaaagtcaaacacatggatctctgcctaggtctcagatgaaggacctggatgggaaaacatctcatttctaagtctatgtgggagtggtaacttttaaattaatttataagaaatataaatgtattagaaggtataaggttaactattagatagttaattattagaacatttcagatgctaacaatcaaatatgatatttttatccatattacaaccaagttaaggtaagaaatgaaacagcatctcattggggtggaatcccaaagagatgtaaacctgagtagtttcaaaatatgtgatggagaatttgaaaatctgcgcttatagattctgccaacagcggatggaagatatttgaaaataataataataataataataaatacaataataaaatgatacaaataaacaatgcactgtaacaactatttacatggtatttacattgtattaggtattataagtaatctagagatgatttaaagtatacaagagaatgtgcctaggttatatgaaaatactacacctatttaacataagggacctgagtaactacaaattttgccatgtggatgaggaggggtcatggaaccaatccccctcagatggttatatcatataacaaacatatgtcttgttatttgtgttgttgcatatttaagaagtctccaacagtttttcccaggactgggttttaaaaggccttaatctactgataaaagctttgtgcttaccctaaaaagtagtcctcctttacttcttttctagcatgtcaagaaagaaacacccaggaagacattagacaccctatgcatataaaaatggcaataaaagaaagccccaaatgccatctaaccaatagaagtagaataaattggtgggcattttacattcacttaaatatccaaatgatttaagaggatgtcgctaaaaattggctgatatattggcttttgtaaaaaaaaaaaatctgaattgaaatttggatatgaaccaaaagcttccgtcttcaaggacttttcaatttcctccagtttgcacgtttggaaactgaacggttcagcatatctctaataaaaaaatcatctcccaaggctcctttcctatgcaggcaaaatcaaattaacttcaaacagaagaggtgagatgcatacatagaggaagtatcaaactctaacatcactttgctccagctctctaaggtctcctaacgtctacctaggagagaaatccaaatgttaacttcacccaagatcactctgaaaaatctaaagagaagtgtggcttccaaaagagaatcatactaaattaattattcccctatgctgtcaggatttgcattgacaacaccatacggtagtattctggacttttacttaagaagtgatgacagccaacaagattccaggctccattcaaaggctacaaattgtgcggcacccttgccttgctagctgggcagccatttgaatcaggggattcttgtgctttggctgcagaagttgaaatgatgctctgtatcgtttgagacatgaactgctgcgtgcacaccacacaacgtcccccagcaatgatgcattgcactaatatgctctcagagcatactcactgggatgtattagagcaatgtatcaccaaaacacttaacttacaggatgtattgccacgtgaggtggaaatggttgccaatgaggtgttttaaagataatttctaaagttgtgtattaaatgatgtttatgtcacctttctggtgatttggaagataacattttgagattctgttatgcttgatctttggtattcagtgccttttccccctcacaaaagcactcttattgcagatcatttttaatcggaaaactcagtaattgagcttcacctaagtgtgacacaaaatgaatgaagtttgtgtgcattgctgtgcaatcagccctgaaattcagttgtgggcataagccctggtgctgggctgcatcttccccagggtgggcgacatatgggctagcagtaggccctgggcagaaaacatgagagccaggtagggatgctccctagaggcagaaagctctctctgcaggcacctacttcctctgttccaatcccgcataccgtttaatgacaggctctgtattgctatagttatgtgtgccaaagaattctgatctctctttttattgcctaattttattagataaaaggatggagtaacattagaaaactagcaatttacaaattctaaaaatagatattagagtttctcttattatatatatttttcagattggctaaaatatgttgctggatacccatttcataaggacagagtccacatctgttttgcttaccatttttccccagtacaccatgtctgacttgtagaaagtgttcaataaatgtttattcaatgcattaatagtcatgcttcccttttacagtagagctatttcatcacaactttttctttggaggcaaagcatgacttctttcaagcagaattgccctctctcgtaaccagaaatcaaattgcatctaataatgttacatcatggcagttacttttgaaagagttgttctaacctctagaccttgcttaaagccaacctaggatctttataaatatttatttataaaaacatgtgaaaaagacagcagggagggggagaaagaaagaaacaatgtgattattactagtatttaccagtgcatttaaacttcactagattcatttgaaaatatgtttccatacacatattttcagaaaagtctttattttgtaaagagatatccacacatatgcacatagttaaagctgcagcagtgactacaaatagatcagaaaaaatcatatatggcttatacaattagtgttctcatgtcataatcatattttgtatactgcagttttttagttatggtagtgacaaatttcctggtatatttcctcctcagtaatagattttttttggcatttttgacagtgtcatatattctagtgtccaatataaaacaaaacaaaaccctataattcctttttatagttgcatttcaaactaataccagtgcattcctgattctcttcctattaaatcatgtttttactcttttttccccctcatttcattgtacatcataggtctccaaaatagctttgattttaagctacctaaagaaaaacatttttttacttgtaaattcaatagcctctctttcattaattaccagacacacacaaacacatacatacccctcttgaaaatgcttccagttctcttttatacattctatataaaatagatgtaagacttgcattgccaaggctgaatttgttcgtatccagctgggtcagggtataatatgatggcagctccttttttaaagcattgtcaatttatatttctcctaaaagatggctttcctgacctcccttttaactttctcattctcatccctctggctttttccctctttacctattctcttcccccaacctcctctgtggttaagtagctcttctttggggctttaattagtaaatactgcacctctatgatgtaatttattatattcttgctaatcttttctgacattttaatgataagctcctggtcatcagcagccatattctcatccaaaacttgtatctatattcccactatggcaagtgatagactgctactatttggttgtgaattttctgaaccattattacgttttcaaatctcagcattttttcacctaaagatgattcttggtgagacgcttcacatgcagaaatcaatgaataagtaatgtaagctgagagacaactctgaaactattatggggacgtaaaagattaaattagaacattcattttttgtcctgttactggcacaaataaaatatttgaaatccaaaagaaaatgttgttaatctgtaaatataaaataagtctcatcaactgtaatagataaatgttagctgcatatacactagttgtctaaaaaaaaaaaacaaagattactggcaaaagtatctaattctatgtctcattagacctttatgattgatttcccgcagtatcactgcacggcagcattccatattttagttcctaagatcacattatatatggaattccagtttttctttgtttcacttatgtgtttagctgaagaacattactaagtactttttcaacctgcggccaaggttaacaccgtgtaaaaatgccaataaaggagaatatactccattatatctattgttatgatcaacaacttgggacatatataaagaaaattctgccataatacatttagtcacggtaatagtacctgactgaaacacacacacacacacacacacacacacacactaaatggtatgtcttttgaaaggaaataactaaattaaagtcatagcaatccagaatagtgatatatgtgttgggaagcccaagtttttaggagatggaataaattgttaaaacagttactaaccaataattttagctataatatgcaataatgtcatctaattatctttttgttggagcacttgtgcatagatagatactataaagtctgacgtgagttccttaaattatatttaaatgtagattaaaagctaggaaaattgacattcagatttagcaaagaaagaatagtattttcctactataatgttacaaaaccattaaagactacaatttggtactgctcattccacaacaagttgttgcagaatattatgaggacacaacggccctgaaaatcttcatttccaatattaaatccaatgctctagactttcttgtgctttttgtttttagagcccttgaacaaaactaaacaaactttcaatttctcttaaatcactctttttgatttgttcatagcaagagcatagtgtcttggactccggaaaggctcagttccagaaagtccacataggaagggttaataaaacaacgtttgataggggtacttaggaggattcttttgaagctgcatttgtacagcaagcccataactttttaaaaaatttgttttgaggtcatgggagattcatatagaattgtaataaatagtgcagagagatcctgtgtgatcattactcactttccctgaatggtaacgtctttcaaaactatagtacaatatcacaaccagggtatttacataaacacagtctacctatcttaattcagatcctttacttttatactcatgtgaatgtgtgtagctgtgcatgtgtgtatttaatttcatatcattttatcacatgtataggcttgtatatccaccatcaccatccctcatttttaacagtgtatgttataataaattaaaaaaaatgctaaagctttttaatttatattctagatctagatagataaaaagctaaagctttttaatttatattctagatctagatctagacaggcatgagatataaatcattcatattattattattttgattggggtcactggaaaggcattgatgagaatattacatgaacgaaatccacgcctccccctacaacttgctctcaacactgagggcatctggggttagacttcaattagataccatgtaaccatcacttcttacctgcagcacacatttcattttcagatttattttcccttaagctgcatttcctattttgacatgcttctctacagaaatcatccaagatattaatattttcttaagtcatatgatcctaatcttaatgtcataaaccccatccacaaactgtgggtagagcgaaatgaggcgtcttgttttgcaccagtttttaaagcagagcaagtgctttttgggctacaggaccaggaggaaaactgattattagctattgttttctgatactaagtctaggatgggattgattacattttgtacttttattctagaggtgatgtgactaaataggaaagcctgtattagactcctaaggagacaaaaaagccacaaagaaccctaatctaatttagagtgtgatgcagggcatggtggctgatgcccgttatcctggtacttcggaaggccgaggcaggaggattgcttgaacccagtttgagatcagcctgggcaacacagtctctaccaaaaacaagcaaaattagtcaggtgtggtggcatgtgcctatagtcctagctatttgggaacctgaggtgggaggatcgcttaactctgggagattgaggctatagtgagccaagatcacaccactgcacttaagcctaggaagaccctgtcttaaaacaaatacaaaaataaaaaaatatatatattttggagtgtgagtgtagaggaagtgagttgggagttcactgtataatgaatacagcaagattcacaaggttgcattattgtcatccagctttttcataaatatgcatgtaatatgaaggtgaatctagtaggagaatatgacaatcctaccactggaaaaagcaattgaacatcaggtgcatccttgtccgagatctacataagaaagatggcaatgtcactaaagttatcatgaaagggttatattttctgatgggggattcttcagaagaatgttttcaagcagcaaggagatttttctgattgaaattatttatttgctttatttcccttcttgcacaatcttttcccatgaggtttgagaacaggtcttattcttctttatatttccctcagattttagactggctagttacatgaaataactattcaataaatatttacagaattatatcatgcctaaatttcatatttcctgaagaaaatgcacacccatattttaaaagaaaacagaagttggaaaacagacctgcaaattataaactcagaaatcgatgtcatccaatgtatgatgctgggtctattttttaattttagctccgttgtttattgcaagcatccatccttcctataaatccccacacctacatccataaacaaagctagctgaaacccacagcgatctgggtttcaacgtgtttcaaaataaaatcatttaaaaatgatcagacattaattcaacacattggtgttaattaactaaggtctgaaaatgtctataattatttttagttgttacttgattaacatagagaagtatatcactattattttctctagaaataaaactgagtgggacagattatgagacacttctgactcacctagttctccaaaagatgctggaacagagagctacgtatgaacaagaaatgtgtcaagtgaaggaaggttggaagaaagtagaggggtatatgctggacaaaagactactcaacccagtagtcaacacattctagatatctgaaaactgagttttccctctcctttgtggcagtctggttcaagagggtattgttctctctccactgcttgtctcctcataaatcatctgagcagaagggcttatttccatgctatgttcacagctactataccgtctagaacactactgggtctaaatacatactaatgaaaataatggagagaaattaaatataagttgctatagtcccaaaagaactcttagaatatggccatacacatgagtaaattaccttaatcgaaggtaatataaccttgaaaatgtaacaattcctttaaaagtattaaaaaatacttttttggaggacaatatactatgctgagacaaatcaacagaattatgagttttggatttgacattcagcattctcatttacatttgacacctataaaacagaaatatataaatttatgaatacacagaagttccctaaggacagtgatttttgtctatctgctgtatttcttgaattctattgtctggcactcaaacatatatgctgaatggatttataattaaaaataaaaatgtttggctagtgaaaatatcctttcttggcctacagttttcaggttaatgtggcagcacctcgtatctatgcatgccaaaaccctaataatgataatccaaataataacactcatattgctattcccactttattggatagcttatgtttctctcttcaaataattaaaactcaaataaattaaactggccatatttcaccatccctcagattcataggtaatataaaggataaatcagtagcccagtaagagacaactaaaaggttgaatttattattctttgcaaccaataagtatgggctgagttcttaaacaagagttttctgtgataatttttattaggtgcaaagggaactaatgaggagaaataggtttaaattgaaggtgagaatttggagggatcatgagaaagaatgtcatgatgatgacagaatggtactagcaagagtctttggagtcttttgagagtgtcaaggacagagtgggcagctacctgttctggacaataagacatctagctagaaatgatggagccaaaccaggttatctttaagagctcaaataaagtaactgatttatccaagagcatacagttacttagaggcagatccaagactatatgccatgtatataaactaggtgcgcttggaaccatgggctaggtcatggtggagagtgacatcttaaaaatgttaaaaaagctatgccgtatacatagtaatatttcactctagtacatcatcacagagagaatatggcttttctgacataaatagtcataaattagtgaaatctgtttgagaacatacaagccccctgttcgcaccaatttagttttgttaataaccgggaagatttggttgatcttcagaaagttttcttagctgcaggattagcaaaaggattcctcgctataaattgcagctttgatttgaaatattagtttaatagatggctaacatctttcagatcctaaaaataagtaataaaaaattactttgcagggcacaagggctcacgcttataatcccagcactttgagaggtggaggactgctagagctcaggagttcaaaaccagcctgggcagcatgccaaatcctctcacctgtggtcccagctacttggcaggctgatgtgggaggttcgcttgagccagggaggcagaggttgcagtgagccgcgactgtgccactgcacaccagcctgggtaagagtgagactcgtctccaaaaaaaaaaaaaaaaaaaaaaaaaattatttaccaggtgaaagaaagaaaacagaagagaataaaacaaaaatagcaaagaggaaacaactacgaacagagacaggggaagccactagcaaaactagcacataaacataggctacgtagcatctctgttctttattaaccacactttgggatctgccagaaaaaaaaaaaaaatcaaagtaccttatatatttaggtttgtgtttatttctaaaatacttatatgacaaaagtactacctcatatcaaaatattaaaacagctttgatggcttccagttcccccgctgaaccatatggtttcagttgggtttcagttgcccatcaacccccgcaatagctatcagaaccagtcccacgtaccttacttcacagctgtcactcacttgcaaaaattctaatgtctaatcacagtacacttgggttatttccctaaggaacccacactttgtatatattgtctctctccctctctttcttctctcttttctctctgatcccattattcattctattcattcaatactttcacctcccacctagttttttttttttcttttagagacaagttctgccgctgttacccaggctgcaattcagcggcatgatctcagctcactgcagcctcaaactcctaggttcaagcaagcctcccatttcagcctcccaagtagctgggactacagacacctggctaattttgtttttaattttagtagagacaagttctcactatgttgcctaggctggtctcaaacttgtgagctcaagagatcctcttgcctcagcctcccaaactgctggaattacaggtgtgagccaccacacctagcgcctctaccttttaacctgattaacctactcacctttcagaactcaggtacatcaaagctaaaaaccgttccctaaaatcctcctctgggattcttacagcaccaagggtgtactcctatcatagaatgacaatgaactgttgcatttgtctccatacctgccagtttccacaaggaatgttacatttactgaggttagagactacatcatgttaatttttgtatcttactgcctagcacaacactcgatatataggggtactcatctaatgtttgaagactgagtaaatagccaagatttattgagcaccttctgtacccgaagtggtacaggcattgtactaaggatattatattcaaggttcacagaatctatcaattccttctcccaatctagaattttctttgaagaccccgaccagatgtcctagccctcaccatcttccaactatcaataattagttagccatgcctctggcacatgcaaaaagtaagatgatgatacacaaaatattaacataaaattattacaagtatctcttccactgtatcatgtgcttaaaatccctgatttctattcctcaccttgaccccaagtgactagtgatgagctggacatttggttggagcccaataaatgtttgttgaatcacaaccatggaattgacaagagtctagtgatctttttcctcttctaaccatacagaaagaaaaagtctacccagtatactgcattaatacgtccttgaaaaattctgatttctagtttgggcctcaggatacttttgaaggagagtgaagaggttatgtctttgaattaggagagaaataatttcaccataaatccccaaagataatgggttcaaaggtatgttgccctaagaaagttattttatttttgtttgaggcaagccgaaaactatcccttcaactcaatatgctaaaaagatatccttcaactcaatatgctaagttgtttgtgtggccatatgttcctatatttctaggtcagtcttgatcaaatacttttcttccatgcaccccataaatacacttgtactcatcagcccatctgtcctgctttccttggcttggaaactgtggtcattgaaaaagttctatttattccctaccaaccatctatctttttttatgtttaacaattttaaaattatttacactccctttctgaacaaaaggaataaatgggcagctattggcaaagaagataaatatgatgagctattctatgttgacatcaaatgacttagcaaagtgcaagtggtggagcaaagaagagcaggttttctcctcatagtttaagggttctgttaccttaggttggtaaaccaaaatgaactggtcttggaatgttcaaggtcagtattgatgctgccactatagtttggtatgctggtttaaaatgctgcaaccacagtatatctacatgaatgtgatggaaatatgagagttcacagtatatctatatgaatgtgatggaaatatgagaatctcagccccatgtagaaatgagaaggtaaatgtatcccatacacaaaataaaatagatgaataattctgggatgttctcgagtgtggcatatagtcactgacatggtcactgcagtttgatgctgtttctcaaacttgagtcgtgcacacaaagttttttttcataaaaataaaagttttaggtccctaagaataaatttacatacctcaccctcttcccacagatcctgagcattctgatttgaaaaataatgtagtagtagtttagcccatgaattctagtatcagatctggattcggtgttcggtgtgcttagtaaccgcaaaacgttaggcaagttaacctttctaaacctcagtttcttcacatgtaagaccgggacaaaaaaaccactacccttaagtaaaataagccagacacaaaaatacaaatattgtatgattccacctatatgcagtatctaaagtagtcaactccagagaaacagaaagtagaatgatggttaccaggggcttgtgggagaagaatatgtggtgttgtttaatgggtgtagattatcagttttgcaagatgaaaaagttttggatatctgttgctcaacaatgtgaatatacttaacgctaatgaattatatactaaaaaatggtcaagatagtaaattttatgtaatttgttttttatgattaaaaataatacatgcccaacaggattacaagaaaactaaattttaaaatatgaatataaagtactttacctaatacttggcaaagtcaatgcactttataaatagaggctattgaaaataaagcaatcaaaattttcaaaagtaataagcacacagaaatttctactgattccagtaaacaattttcattccctagtcactatttttaattggtttttgatggggcctcagtcaagaagagcagtgtactcattcagatgattcattcatattgccaacttcagtgattgccatgaaccctgttctttcagtgaagcagtaagtggtaacttgagaagtgccagcctcctaagaggggtcactgagttacatttggtcacatctactcaggcattctggtaggcaacaaccatttcaaaaaacctactgagcagagccacacagattttctttcttctggagaaaatgggctggtgacatgtctgttatttgaagcaagaagccaaagtccttctcaaattgactcccactcttacctcgctgatacatcctttctcacttaatttgctccatctacattagcctttttcagtatgtctgaaatgccccaaacctacttaccctccagggtgtttgcacttgctgttctttctacccagaacgttcttcctcaatatagccaaagggatcaccctcataccttcttcaagtttttgctcacatgccactttttcagtgtagctctctgtgaacatcttataaaaataattgccaccatcttcttcttctggcccagggacatgtacttaattatttccacagtaataacagccacagataaattatatattttaaaaatttatctagtgtctgtctccttccagtatagtacaagctctataaaggtaggagtcattttcccttttgttccctattgtataccgacctataatagtgtctggtataaagtatgcacatattaaattttttaatgagtgaatgtattggtgcaagccttattcaatatattaaaaaaaaaagtagactaatcaaaagtattctccccacaaaagaaacatctaagaaaaattagtggcttcacaagcatacccttattaagttattttccattaaactcaagcccttttccagttcagtgagaggtcttctgtttctctaccattaccctaagtggaaggggttggaaaacatagaagctaacacctcaacagttgttgaaaccaatttgggaatgtagaggtacaggtagataaatgtagttaataatgtattcatttacaataatacaaatttcctgttatagtaattagctttatgaaaatattccttagattcctggtttatgctagaaaataaaatgtctataaatattattatatttgccattggtgtcaatacatggcttctgttttgtattaggaaagataatttccaaagaaagaaaatactagaaagaattcacaacagtgagacacaaatcctgagttccaatgcaatcttgtctctacccagctccctgaccttgggcgagacacaatcttttggtgtgtctggctgtaacagttgggttttgctgcaaacctacttaactccagtgagcctcgatttcctcattggtgaagcgagcataagaatccctgttttggccaggcatggtggctcacacctgtaatcccaactctttgggaggctgatgtgggcagatcacttgagaacaggagtttgagaccaacctgggcaacatggtgaaacaccgtctccactaaaaatacaaaaattagccaggcatggtggtgtacacctgtggtcctagctactcaggaggctgaggagggaggctcacttgagcccaggatggggaggttgcagtgagccatgttcaggtcactgcactatagcctgggtgacaaagcaagaccctgtcttaaaaaaagaatccctgttttccctattgcagaaagttgccttgtaactgaaaaccaagactcataccatcggtgatatgctaggtgaagttaagtggttcaaaaactgtatttaatttctgaattatagttatttggatgtgtacttggagggaaaaaagtataactagcatattaaaattgtaaatatatgaataatatttaggatgagattaatttcaaaagtaaattgtttaaatgtaaaatattaattaaatgataagatagagaatacatatatatgtctcaattatgaaagtgatatacatataaatggggtttgtgaaaaaaagcttgaagaatcaatgttgatggtttgtgaattttctttccaaagttaacagtacaagccagggtaagatggtatttatatattaagacaaatgcaaacaaaataagatgaaaataaatgtaaataatatgaagtattatgattattttagtaagaaatgatcttctttgtgagtgcctattatattctaggcactcaataagactaggcattttatctgttagctaaatgcttgctagcaaactgactgcaattgagttagagcaagttgattgtttcctacatcatacatccaggccataaatccagttttgctgattctagcctatgttctaggagagttaaaattttagaaacagcatccagaattcaataaatatatgtttttaaaaaaccaaaaggcaaattccgcaaatgaataagctgctttttttaacatgctcctgatggctccctatggcaatactgtggaaaaatagaatctgagccttatgaacaggaaataataaaaaataacattaaactaaatagtaactgtgacactgggtctttgacagagctcaaagattctgcacctcatgaaatcatatattttaatgggaagtgtgtagaacatatacagtgtgtataaacattgtgacagtataggaagtaactaacaggaactctagagtgctgaatgtctgactcctccgacttcatccattactgaaaaatttgtaatggtaaaaacgtgccttcagtaagttatagtatttctgttctagtctgttcttgtctatttattggctttttggagtttacctagttacctattttctctgagtcttaattttctcagattaattagaaattagttatatttcatcattagatatctaatgatgagtttgctagtacaatgccggttagactacccacagtgaagaggaagatgaaccctacggctcagagtaccgcggcagatcatttgatgttacttctgtgaagcgtagcaagtcaactaaatactttgacgccagtggaaatggcgataattatagtagcggaggtgaagtaggctcgtgtatccacgtctatccctactgtgaatatatgatgagctcatacaataaatcctaggaaaccaattgatttcatagctcagactatgcccatatacccgaatggttctttttttccagaatagtatgttacgatatgggaaattatcccgaagcccggtaggatgagaatatagactttggggtgaccgaagaatcaaaataggtgttggtacaggatagggtctccccctccgactggatcaaagaaggtggtatcaaggttgtggtctgttaataatatagtaatgccagcggccaggactggaagggagaggaggagtaggactgctgtgattaggacggatcagacaaagaggggtgtttggtattgagatatggcagggggtttatgttaataattgtcacaatgaagttaatagcccctagaatggaggagatacctgctagatgcagggagaaaatggtcaggtctacagaggctcctgggtgggagtagtttcctgctaaggaaggatcaactgtccagcccgttccaggtggacatggctcactgcaacctccccatcctgggctcaagtgagcctctctcctcagcctcctgagtagctaggaccacaggtgtgaaccaccatgcctggctaatttttgtattcttagtggagacgtttcaccatgttgcccaggttggtctcaaactcctgttctcaagtgatctgcccacatcagactcccaaagagttgggattacaggtgtgagccaccatgcctggccaaaacagggattcttatgctcactttaccaatgaggaaatcaaggctcactggagttaagtaggtttgcagcaaaacccaactgttatagccagacacaccaaaagactgtgtcttgcccaaggtcagggagctgggtagagacaagattggcactggaactgcaaatgcctatgatttgcctgaaaatagaagggagggatctaactattgtctgtttcctaggcacgtgcaccctcattagactgtaagcaccacatgaagtcagaaaccattaggttttattcactattatatccttaatacctggaatacagcagatttttcataagtatctgaatgaatgtatacacaaatgaatagaatgtatttatggaacacctgtcatgtgacaataactgtgtaaggttcattgctcaagtatgaagcatagtaaaataaatgaagacaatatgtaagttttaaaacaccttgtaaatgtaaaatgctacaaaagcatttttagagttttaaaaaatcatttacttacatgcagttttaaatcacagccctcaaataagttccaagtcagagattttatcaagattgtatttacttttttaaaaaatggagttttatgctgctgtggttatggaatgtgcttgtacaatatatatatacatatacatactgtttgatgtagctctatacaatgctgcttctttataatattgcttatgaactattttgtttaatgccactgcgtctatgaaacattatagactattctgttagtatgcacagcttttcccatgaccttaatacctttatatacctaagcaatgagagtgtgggagaatgtattgcattcccctggacaactaacattaactcactgttacagacctaatatgtgtgccccctctccacccatattcagatattgaaatcctaactcccagtgtgatggggcctttaggaagtgatgagctcatgagggtgaagactcatgaatgtgattagttacttccctcataaaagagagcccagagagctcccttacttctgctatgtgaggatacagcaagaagatggacgatcatgaatcagaaaatgggccctcaccagacactgaatcttccagagccttcatcttggagttcccagactctagaactgtgagaaaccaatatttgttgtttgagctgcccagtctatggtatttttgttatagcagtcagaatggactaagatctcaacatactctaaatactctcagcaattggctcaccatactctaaataatataactccctgccctgattgaaaatgttatgttccaaacacagtctcccccactgaggtctctgtcttttattaagtgttttaacgtagtggttgacaaaatatatacaaataatattgatcaacatgctgcaaagaaaaaagaaagtgcccacagcactccaggggttcaactaacaaaccagtggggagatgaaatagaatagagctggttctttgaggtcagggactgaggcttattcaacattttatctgagcttgttgtttattcaacattttatccgaacttggtttctagcatgtagtaaaatgtctgatgactcgacaaaggaaaaaaaaaaatagatacctaacataagaagagctattagtataaagactctgaagctgactgcctcttcataattaggacagtcaaggaaaattctaccatacactatatatcagatagatagatagatagatagatagatagatagatagatagatagatagatagatagatgtatactagtcaggcctttaaaaaaggacagataatgacctacagaaaggaaaaagtaagccaaacaatgatagtgatgtaaaaaaatgtgggtcccaggaagttctgagttatctatttttatttatcataatgcctatgatttccttcttctttgaagtttcctcacatcttattccagttctcttctctgctattgtgattctgtccggtttcagtggctcttcccaagggggctgacgacagcgaggcctctgtgctgtgctggggaggagggtgacccctatctgggacagcacatggttctcttccctcagtggatgctgccaaagccgagcagggaaatgcgccccagtgtgcatgctaaatacaagttaggcgcccttcagcgaagatttcggcttggcttccttcccttggctattaagctacattcccacaaaattactacatgtctgaggtttctaaaaccttttgtgtggatctcaaacagttactgtgttggatccaaatttcgaccttggttaagcaagcctcaaatccgttccaagctgctccaggcagtgatgctccaaggacacccgatgcaaggaggagataagaataacctctacagcttggtgatcacctactgtgtgtcagtcatcgtgcttcactctttgcatgcggcatctcatttaatcctcactataaactgtgcttgctagctactacgactactctaattaccactaatttacagatggcgaaatgacagtttaaggaaattaagaaacttgttcaagttttacaaccaataattattaaaggattaaaagtattgaaaccctagcagtagacttccacagttggcaagggccagggcaaatgacaccagagtgatctaaacagcctgagtaataataaaagccatcaatccagcacataaactgcctgcactctgtgcatcccaaaagacaaagagaaaagtagtaggccatgtttctttatgcatctaggtggcaagtctatgagctgagagacagtccctctgtgaggagaaacagaagttcacaaaacagagggcagggaggttctcttagcttgtggcaggcaatgagtcaggagaggtaacttttggaacagagcttgctcttggcttagggagtaaaaagtgaaaagacttccaaggactaacaggttctctccttacacagggtaatgaaggctatcacactcagggcttagactttgttgatttatagactttgtaatctattgcagtgagcttgactgttttgattctttttttgatacaggtatctagttcaggggaaaagatgctcagagttagaacccttgtgtatagtttgagtatgtggttagcgaaagcctagagaaaaaaattttgggaaaacaattttgtccaagtgcagagaacaaaacttgcattacagcaccagcagcagaaagcttgtcataaagatggggaagtggagcagtttcccagagcactttatttaggaaggcctcgtagccaaatggaccataatcaaggtggtgatcaataattactactctaaaaagcccctggcataggccaaatgaacctctctttcctctcccttcaccttgatgctctgctctcaatcactacaaaatgaaattctcccagatcagagtctgtagtttttgtgaacaaagtcattgatctctgatcgtgtgttattttttgtgaaacttataaacttaagcatgattaggtgaatgaatactgtggcgggataaataaggttacccaatcttatgtaaatgcacaagaatatgtttggagcatattttcttcattccagtcagcccagctccacctcagtacttctgcattgacaaatgaattgaaaatgaacacatggagtctgtcatctagtcccagcagggaactagtatgatatacttaaagggcactgaatttacaagcatgtatatttctctcatatttttctatctttagaataatataaactgtgaggtataaaaatatggtaattcaacttgtctctttgatactatcaattttaaaagccatcaaataagaagatttagatgaagaaaaggaaaacactttatgaatcaaatagactgaaatgcaatattatatttggggttctatctgatccctgcagttagtgttcttacagagtagattttgtggattaattgtgtgatgctattttatttgttgcttgcaaaggggaaggtgatcaaaattcttttgacttatttaaaaacatctatatattttggccacgttttaaagattaaacaagtgttttaaatggcacatgatagttgttattacatccaacatatctaggctgttaaaaacatcttattgtatgacatatattgtaaatgttaaagaaaagtaactatcaccatatgcttacagttgcatgaggatgatacccttgataccttagcctctgaaaaggtataaaaaaaggtaaaaattgtaaaaaagaaatatattaataaacattgatacattattttgaaattgacaatctgaaacaatgatataaacaaatttgattttgcttggcacttctccttcctgctgccatgcaaatgaagaaagacttatttgcttcgccttccaccatgattgtaagtttcctgaagtctctccagccatgctgaactgtgagtcaattaaacctctttccttcataaattacccagcctcgggcagttctttagagcagtgtaagaacagactattacagatataatttactacatatcacaactatagatattcccatacggaaaatgtatatttgcatttttaaatgtatgctcgcatttccttggttttgtggttcatatttggtagtgaggtatatcagtcatatggtcatatttatgtaaactgaaacctaattcatatgtttctaagttcctgtgccctaaaaaaatcaacatgcacatcagcactgtcggggaacctttaacacctgtaggcgtaagtatgggtgagtcatagaggaagtcatttgctccagattattaaacatggaagaaagacctcctgataactttattacacatgataacgtgtgctaggctaagagagagtcattaaaccaaaaagcaaagccttctaataaagagctgaagctgaagggaaggactaagaaatgtctctttctaaggcccatagaaatagtataaatgtgttgtgtgctacctaatcattgaagaaataagatacatttaaattttagttattgattctattcacgctaacagcattttgaatcctataaagagaggacaatcctggggacttccttgttttccctttttgccatctttcaccacagcgtgtttttacctcttgtcttactccatcctatctcaacaccaggggtgactctcatactgctcagggctaatcactccacgatgctttaaatccaactcatttattcattattcatattgtgtcttttgtccacggtaccctctgagcactgagaggaattctaaaatgaataagagttgacctctcttcttaaaaaaaaaaaaaaacaagcaaaacaatagtgaaacaccagagcggagatcttatctgcacatccagattgggaaagctggtatgttggggtgcacaaacatggggtgtgtattgttatgaggacatgtggccacctggaataaaatagtaaggagggcttttgaaatgatggtgagacctcagtgtgctgagtataagacactcgcccaagaaagaggagtttttcttaggctgtgacctgatttgacagaaaacatattctgggttttggaagaaagaaagaatttgttctctggttattattattatttagatatgagatgccttgatgttatgcaatttttctctgtactacttttttgcaagaagtggggcatgctccaaatcccttgattatgatttatgggccagggtaaaaaaaggaaaaaaaaaaaaaatacccacctctcctcctactccagtttgacccttcccctctacctttgctccaggtgagagaagcactaaatcacagataagagccagagtaacatttatagcattgcaaagatgccacggtcagcatttgaggctatgagtgtggcaagtcctcccggacagatagacctgagattaatagaaacggatcaaagacaagtacccaggaagaatgattccaggaagattggaagggctgcctcagaaaatgcatatcacttgtaattctgccatagaaagggagaatttgaaggcataagtctctcaggtgttttttgactaaagtcaattatgactttagtttctactgccattattatctatgttccttaataattctccaccagttctgctgtagcaaggagaagtgagaaccaaaatgctaaaacaatgcaaaaaataagcaaaagctttaatgtaagaataaacactgtgttatagaggctcttatctttccatcagtttcaacttctctctcctaatggcttcccaacaatgtcttggttatttcctctaagaacactaactttgcataagcatatatattcctagctagagtagactggtttcatgtttgttttgatggcactgttatgatcaggcatcagaagcttctcctcagccttttacttcttccagcaacagtccttctctctctttttgctcatggccaactttctaagaaaaacaaccaaataaaaatacattgcttctttctcttcttcacccactcttcataacctcttacaatctgagttctttggataaatatttttttcaaagatgcttccactaccttccactaccttttctcagatcgttgtcctttctcagatcttctcttttataatagttgtctacatcattcacgatctatcccatgttattaaaaattgctgtgttttggagcatcttctatgtggttctttgttgatgtacaccatttcaaaatgccaaaataaccctttgttatcctactcccctttcacagataaatcacattaaaagaaattatgcaatttgccaaaactgctggacttacgtttggaatagaaatgtctaattccagatctctgactctctccactattccactgtgtctagacagtgatactgtgtagttcacagtaattttattacaactactagaagaaagggctcagccaggtcaaaactacgaaaagctttgtatatagcagaacagatggtgaggtttgcccgttctcccttggagaagggacccatctgtctatctggcttgacagccttcaggagccccacctgacatggacattcagtagggatttccctagtctgcctggaaaataaaatctatttggattgctcctcaggtgcctatgaggaacgtgggaaaattcctaggactttttttttttttttttttttttgacccagtctcgctctgttacccaggctggattactgtggcacgatcacagtgcggtataacctctgctcctggactcaagcaatcctcctgagtagctgggacaacaggcacacgccaccatccagttaatatttttgtattttttgtagggatggggtttcaccaggctgatctctaactcctgggctcaagctatctgcctgcctcagcactcccaaagtgctaggatttcaggaacgagtcaccgtgcccggtgggacatgcttcttaatgaacaaagtcatatggagggtcttgtcttgaggagggacatggctctgtcttaggctttagttgggtctctgttatagctagctcagaagagactgaccctctagccatatcacaataccccaaacctttgaatgatgtgtcagcagggatacagtctctcttatctactactacagcagcctgaggatctactttcaaggttctatctcaccctctccagccataaggccccctctcaagctgtttcctcttgtgttaactgtcattcagctagtgccctaccctgggatacattcctttcctctgatctcttctcttccctgtcttatcttcataccttcattctctaaagtgggtgcatctcaatgtcctgatggttctggttttctcccacgtctcctcattaaacttcccagaatgagcatggcatatccaaatgttcaacacctcctccatgtgaatggctcctcatctctcttctgagaacctgttctgcattcctctttaactgcatgtttctgaagcactgcaaaaataggttttcttgtttgctgctcggcagccaacacacattcagaatgctgctcagtgttcaataaatgtttgttaagcaaataaatgagtgagtctaaaaaaatgatttgagtctccccctgtctgtcttcattaccttttctgataaaatgcccattcccagcggggcacagtggctcacggctgtaatcccagcactttgggaagctgaggcaggccaattacctgaggtcaggagttcaagactggcctggccaatatggtgaaacgtcatctttaccaaaaatacaaaaattacccgggcatggtggcaggcacctgtaatcccagctactcgggaggctgaggcaggagaattgcttgaacccgggaggaggaggttgcagtgagccaagatgtgccattgcactccagcctgggcaacagggcaaaactgcgtctcaaagaaaaaaaaaaaaatcccaaaagcctcaatacctctacccggtgaatttacagaacaaataaatgaatgagtccaaatcaaaactaaattttgcctgcccttatccagtactcttcctgccactgcactgacatcacagcacagaggagggaaacagcccttagaatcacattgatttagtttgcatctttgttcagtctcttaacaggatgcagccttggaaaagttacttagcttccttgagcctcctctataaaaaattaaaaaaataaaaaataaaataaaataaacttttttaaatcagaaataattactcttcaagtttaaagactaaatagcatgtgtaaaatgccccaaagccatttatacacatacttataagctgtaatcctaactctcctatatatgtgtgtatatatatatgtgtgtgtgtgtgtgtatatatatgtatatatgcgcgtgtatatatacatatatatacatgtatatatgtatatatgtgtgtgtatctatatacatatatattcatatatatgtgtatgtatatacatatctatatatatatacatatatatgtatatatacacatatatatgtatatatatatattttatttttgttttgtttcgttttttgagacagagtctctctgtgttgcccaggctggagtgcagtgctgtgatcttggctcactgcaacctccgcctcccaggttcaagtgattctcctgcctcagctgcccaagtagctgggattacaagtgcccgccaccacacttggctaattttgttttgttttgttttgtacttttagcagagacagggtttcaccatgttggccaggctgctctcgaactcctgacctaaagtgatccactcgcctcagcctcccaaagtgctaggattacaggtgtgagccaccatgtctggccaactctcctatttcttttaaagatacatcaactacctcatttaacactcacaaaaaccgtatctgtagatacttttatgtctccaccttacagatgaggaatcagagggactgagaaaatgacttatttgcccaaggtcacaccaaaataaaatcctaggcagtattactacagagttcatgtaagaaatattcttagattgcaagctcactaagaaagccttataaaaattcagcccttacaaaaatgggcaagccacaccgctccaaataaattgtgcctttagaaggtggtcactacttactgaagtaataaagaaatatgtttacctgttgaaatctgacttctcggttcaatgctcaactattttagaagaaaatttgtatctctaacaatgccaaatgcagaataaatattcttgccttgaaaattatgatataataaagaaaacatacttgggaatgtttttccaaagacataatgagtattgcatgaaagaggacttttaagttaaagtgagaaacagaaataattcaagggaaacatgctttactgaaaattatataagtcaatatcccagaaaccaagtaacaatttattcgtcagaataaggaatacatgatcaggaaatttgtctggctaattgaagttgaagaggttgcacttgatgaaaaggaaatcatcagaaacgcctggatgtttcctataagaagctaaaatatgcattataattccagctgtggatagaaatttaatgcatttttacaaggtacaaagggtgaataattgttttgtcagttgatggggtggattttagttattttaataactataacctaattgaaggaaagcagaatggcatatcagaaaatgggggatacaaaaccaaatggtggaaagcaaattgattgcttatattagaaattaattatatattaaactacccagagttctagataaaattaggaacaaaaataatattttagaagagatgtgtctgactagccaaaagcaaggagaaatgcagaatgtcactgaaaatctaaaaataaaagcctgaggtaaagtgattatttcctcaaagaataaggatgcacataatgtatcataatttcttaattagagttctatgacaattgtagttacatccttccagggatagatatattatgacttgcaaagtttgctaatggctgaaaataaacaaaaaaaaatagaaaaatttctaggtaaaagtagttaagactagctttttttttttttttttttttgagacagagtctcactctgttacccaggctggagtgcagtggtgccatcttggctcactgcaacctccacctcccgggttcaagtaattctcctgcctcagcttcccgagtagctgggattacaggcgtgtgccaccatgtccggctaatttttgtgtttttaatagagacggggtttcaccatgttgaccaggctggtctcaaattcctgacctcaagtgatccacctgcctcagcctcccaaagtgctgggattacaggcataagccatcacgcccagccaagtcttgctttttgggggcaaggaatagtaataaatgtaaaagacctgttttatggaccctggaacagctcatgactttacttagaagtttctacagaaataactaaagaatgacatttctccaaaaccagttgaagaactttttagttagatgatgacagacaagaaagtcaaggttaatttgagatatgctggtagaatcctaagatcattaaagctctggtatgaataagaaaagagaaaatgacatgaaggattctgacatttagaaaactagcaatgggaaaatgcctttcacattctaagtttatttgtgaattaaaaaaaaatgaaaaaagaagtattgggttatgttgtagatgcttctaccaatatggttattattttattaagttgaagatcttagtgaattcatcaaggatacctgactgatgagacatcttggcaaaaaaaaaataataataatttggaagaagtcacttaatctcactgtgccttaatttattcacctatttaactacagggtttatttccctaaacagtatgatatatactctttatattttttctagtgttaacattttaagcttatggaaaaacatgactacctacgagaaaaataaaagtaaattaaatcagtgtgttgtgaagatcccatgtgtttcagcattcatcagactgaaggcagtctccaaaacatccaaacagggtttttgagaatttaactcttggatctgttcttcaagtagtataatacgtggtttgacatgcatgctagacacctgtttttcaggatggtaccaaaacaacagaaattctgatgaattatgtcattcgagttatcacaattgattattcaaataactctccgtaattatgatcttgacttctacaatgtaattataagaaagtcagttgttcaaagatatccaaaatgttcacccttggcaagcgatggatgggaagagtggtgacaagaatctgaaatttgaaattaacctgatgtatttgtaagtttttcctaacaatgttgccgtccattaaggactgtttttagtggactttcttaagcttgtatagagttgacctgaaggatttaaaaaccatttcagtttattcagtgtttgccatgtatgccatacacatcatacactggagtacatttaaatatcattaaaatgtaccactgcataagacaggtctgctccttccttgttctaaggtaattctgtttcatgggttagtcagacacaaaccggtgttatcacacagaactgtcacgtatttgatctgcaatgttcaccggttacatggagctaagaaatatacagaagctaatagagttataaagagtctggaccaagaatcataagacccagttatgagttgttaaaagtgagggtgaaacatgtcccttcagttttctcattttaaataagactaaatgatctcatcttttttattttctttaaaattttaaggccttatgcaaaaggctgaaaatctaaatggctaagatttaatggaatccataggatttcaatgagatttggaaaattcatcaactatgtggcacagaaaatacagacagcacacatgtactatattctgtatgggatatcaggaccaaaacaaaacaaaaaaaatcaccatccaggttgataaatggaaaaaagagggtagagatctcttcctgatacatcctcagagaagattttggcctccctaaaaattccactgaaagttaggtgtctctaatgttcatttttcttttttttttctctcaagcttcatagagatcctctatatttaagtttcagttttgtttatctttaaagatctcttcactgttcagaatttcttttccagaatcaacaatcactttccaaaaattgctcttatttttaaattttgtacattattttttccatcaagaaagatgattatcaaaaggaagtttccttccttccttccttcctttttctctccctttctgccccctttgctcccttcttcccttcctttcttttaaaattactgatggctcagatacactttctattcttcatagaataaaagggaacatgtattctggcaaaaaaggaaacagactttactgacccagaaaagaaagcatgttttgaatctcatccatctcttccactggcattttaatgtcctcccataattacacactgcttgcttagcatgtgtgatcataggaccaactacagggatggcttctcactctttgatttatattctttaatggactccagccctggggccagcagagctagaacagaagacgcagtctgcccctgatatttcctggtctttgccaagagtttgcagtcaaaaactctcctagaaatcatttcctagagataatcattcttaacatctatcctctggaagagatctctcacctgttcacaagcaccatacctctcagagaatcaaacaattatttaaaaatggactatgaggcaactgcacacagagcttatccatctacctttgctagaatacagagaggcatggagcagtggaagcatatccagtattttgaatttttaaaaacatcatgtgttttgatcatataccctatgactggactatgggaccagcttcaggtttaaagcagtgaagctgtttgatggaaacctgtaaaacttaatgagaatgctgagctctagcatcaaagccgttggctggctcagaaaggctgtggggacgtgggcagaggcagacttttacatcttgtgctgcttcttgataatctgattcttggatgctttgcccaactttacttaaaaggggaaaaagaaagaaagaaaaactaagcaggcagataggaatctctttcaacacacttttttcttaaatttgaagaggatttggtttgttagtttgcttttgatcaaggagatggtagtggtagaaaattcttgtctctcttacctttttggaataactaaggtcacttagtgtgatatgctgggacccctttggctagatgacttttcagtaagaactttaagaaatttatataaaaatgttttctgtgtttgcaaccacagaacttaaatattattgtagagagggaccttaaggtacacagagattaatgctttcacttgaaagatgaaaaccctagtgctcatagaagttgaataaaatgcattgcgttgcactccacatagactggtcaaccttgatcactgggtagtctaaacgattaaagactgcatctcatgaagccagttttgttagttccttcatgcttccgaccactcaagctccccactccttttcactttaatctgaagcatatctggtttgattgctttgtttgggcagaaatatgtaaattttgcttgtgtttgtattttgtattcttctttctccaaaactgtaaaaagtcaccttaattctacctttgaagaatctctacactgtatctcccactggatctgtttcagtatatttacatggaggcttaggctcttttgatcatttattcctataaaatgctgattctatgcagagttttctagaaatatccatggcagtgaataataaacagcagccttgattagggtgaagttgtttcccttgcatcatttgcttctgtatcaccttatatttctgttaaaaatgcgggtctactgttgaatcagaagcaagggggacatgaagctgcagtttaataagctctcagatgatgcttatgcacaaaactctgaaccactgacctacagggtaaaacccaattcctttcctgcagcagtcacatcctgtcattactttatccatttcaacatcatttatccaaacttttatccagcacaattattgacctcttttccccatgcatcttttctccagacacactaattccagatataccctaaacacatcatttattattttacacctgcaccttttctccaacttttcctgtctcgactcttatctctatttttgtttacttggtgacatactacttttcgttcagtgccatactacttttctcaaatgttacctccttgggaaagccttttcctaaatatttctcagtcaccatccctatactgcgttgcaatagaatgtagcataaatctctcttatagaacctgtttcatttgaatgtaattacaatgaatctacacaaaggttatagaatacctactatgccccaaattataccattaaagaaataaaagtcacaatctctaccatcacaaaaattactatccagcttttttcaacccaaatcctcatctgaaacagagaaaacagaaaggtatttgagtatttcctcaattctcccaaggaggatacataactagcaccattacatacaacagatgtcttagggctttagggtttcatctacttgggaaaccccagttgatcaaatactggtaaaattacattacagtagcaataaatgctatgatagagataattcaaaggtgagatgaaaaagcagaaatatctaattgagtatgtgtttatctctcctcaaccatgtcttaatcctgtttctatgcttatttagcatctagatcagtgccaattatgttgtggtcattgaatacattttattattgaattaaaggcattgtaattcatttttattagtgtgactctttggaatctggccgaggcaatgtgaattatccatatttgtaaatccagcatctagtcagtgcttaagatactgttggcactcagtgagggcttgtagaataaatgaacacatttggaggagttgccctattctccagtagaaactcaatagcaatgacaacaataacccaattaaaaatgggctacggacttgaataaacatttcttcaaagaagaaatacaaatggccaacaggtatgtaaaaagatacccaacgtcagtaatcaccagagaaatgcaaattaaaactacagtgagatatcacctcatgcctgttaggctggctattattaaaaaagacaaaaaagaaaaaaacaacaactgttggagaggatgtggataaactggaagctgtgtacactgttagtgaacatgcaaaatggtgcagctgctctagaaaacagtatggaagttcctcaagaaaataaaaatagaattattatatcatgcagcaatcccacttctgaatattcagccaaaaaaaaaatgaagtcagaatttttaagagatatttgtactcctatgatcactgtagtagtcttcacaatagccaggatgagcacacaacctaaatatccattgatggatgactggattttttaaaatgtggtatatacatacaagggaaaattattccgccttaaaaaagagaatcagccaggagcctgtaatcctagcactttgggaggccaaggcaggcagatcgcttgaagtcaggagttcaagaccagcctggtcaacatggtgaaaccccatctctaccaaaaaatacaaaaattagccaggcatggtggcataggcctataatcccagctacctggcaggctgaggcagaagaatggttgaacccgggaggtggagggtgcagtgagctaagattacgccactgcactcctgcctggccaacagagtgagactctgtttcagaaaaaaaaaaaaaaaaaaaaagaaggaaatcctgcaatatatgtcaacaagaatgagcctgaggacattatgccaagtgaataagccagtcacagaaagataaatactgcatgattccacttacaagaaatatctaaaacagtctatgtcatagaagcaaagaatagaattgtggttgccagggcctggggcaagggagaaatggggagttgccaatcaataattataaaatttcattatgcaagaagaataaattctagagatctgctgtataacattgtgcctctacataacaatactatattgcacatttacatatttgctaagtgggtagatcctatgtgagctgctcatacaataataataataataataataataaaataaaacttctttcatatattagaatatattcatttggctagatgacatagttatcttttcccaagccacccatcaattttacagtcagttcttccctctcagtaagattgaaaattaaagaataataaagttttagaattgaaaaaagtgatagttttaatttgaggatcagaagtaatacttaaagaaaaactactaggaatgcaaaattcttcctttgtggttaatctacatttataactattccacttgacatttaattgcttcgcgtgttatgtgtatttcaaagacaaaaagaaagagtttattaagactgcaaatgaagtgaaaaaatgctgcatttttctgggtggacagtaggggtggtggtggtattttcagtgttattgtcatctaacgaagcctaatttagtttgaatatatattttggaacaaatagcctccaaacacaaattcagtttaggggaagatagtgtgaaaagggataaaatgccataaaattctgatgtcctaaagaaaatgtgagagtctgggacacctccttgttctctgcaaagcctgccgccagctcacttcagacaaagttgtctttttataaacatgatgtaagcatacactcacaagctctctggaaataatgatgtttctacttgtgtcagttaaaggcatccctttgttcatctaatcaccaagaaaatttcaaggcaggtgtgcttcagtttagagaggtgccgtacttcatgggtgcctctaagggactctttacaaaattcatgctgcagaagcagcattcccctaaatggttgcttaagactgcaaatccccaactgtccaatttatatccaaggaagagtttactttctttagggcataagccattatattacaaagtcattaaaatggaaataaatacataagttagcaaattgtggtaaggtaaaataatcttatataaaccatggcctaaaaataaagaatatatacagaattcagcatgaggatattaccatacagaaatgataattaaccaaagtaaacctgcacacagtgattttctgcattttggcaagtgaaaaatttttgctatgaaagcaggactctaaaaatcaaaaaaaaaaaaaaagtaaaggagacctagttttgaattgatattaaaacacacaggcattttactttaatggtcatgggcttaggtccaactatttcagaatccaaagcttattacttagatagtcaacgcacatcattccaagactgcagctgctcctaatttggattgttaggggattatccctataagagtcctcatggctcatctgccctcagtgtaatcagatgagaagatcctgacttccatctccagaaagaaggccaagcccacctggggcctgggggtaaatgagaagcccacatgggtaaatgagagcttctgtgggatcttgacaccgagatgctgagactccaactgtaagcctcagagtcactactgagctacaaatcagcagttttacatttattatttctaaaatctggatttgagttgcaatcaaggtatatcctgatttagattaattggcagtgtttcgtgatccataaaataattgtgcaccaatactgccaatgatgacaatataatatggtggttgacgtactctagctcagtgattttcaaactttaatatgtatattaaatcacttggggatcttactaaaatgtagactctttcagtagatcatgggaaggggcatgagtcttttcatctttaacaagctcttaggtgatgcacatgctgctggttcacatccacagcttgtttagtaaatctctaggtatgctatgagttgttcatgggctttatttccttttaaactacctaaaaactacagcttttagttacatgtccttgtttaaaaattgttcctatatcttctatgtagctttatatgcacatattgttaaacagataataaaccaaataattattaaataataactaaaggtaatgttaatgaaagattggtttcaatccttgatgatcacaccttatagcctggataccttggggaagaaaatgttactgaataaggtcaatttactctttcaaacaaacatttcagacgctcatatgagactctgcttggtttacaggtagtgaacacaggcagggaagactaattgcttctgaaaaataatgcgaaatgaaatctgatgatgacaatgataacattcttaagaactaaaataattacttgtatttgaactataaaaattaactgactattcccaattcagttcctttacaaggtacccatatttaaaaaaaaatccagtttcttatttatctctaccaatttttgatacattagatagtggatgtcatcatttaggatagcaaaatggaaagcacactgggcttggagtcaataaacagaggtttccttctgacttttttcacatattagggatatggctctgataatattatgtatgatttgtggtctccaagttaattcaattttctcacaaagctcttagaacaattaaatgaaacaacttttaatatgagacaatgtgtgcaaaatctcataaattcatctgcaaccaggacaattcacatatttgtaggggtcagtgtaaaatgaaaatgagaagccctctgttcaaaagttattaagaatttcaagatgacaagaagaagatattaaatgaagagcagggcccttctatgtgtggagccccatgtgactgcataggttataagtccatgagaaggccctgtctgcaagataattgtagctaatcctcactatattaatagagtattaataaagtttatacttgattgagatattacaatataccaggcactactctcagagcctcaattacatagtctcacttaatcctttacaggggaaagaaactgaagcacagaaacatcaactatcttacctcaggtgatacaactaccaagtttaagggagccaagattggaatctgggagtgtctgattctaaagccattcatcttaactaatttaatgcaatgagttatctataaaaagttattgttattcctgtttaattcaaatttagaaacctaggctcacaaaaatacgtccatatttcaagggcaattcacttactatgaccttgattaaatgacctatgtcaacctaattgtcttatatccctagtactccacagagagcctggtacatagtccattgtcatgtactatatataaaactaaacactcagtcaccaatttttctgtgcacagaatatttactccacaaagataaaaatctcattttcctattattcaaaatcacatgcttcggaataagagtattattttcatttaaaagcaattaatttgttttaaatgtgtttcaagagtgatgattttcctggggaaaaaaagacaccaattaacatgcacagaaataatttccttccaaacataaggactttgatccaaagatctaaagacaagagtatatcatctcataatagaaattaagaggaactccaaaatactcattttgttttggatgaacttcagatttttaaaaaatatggctcaaacttagttaagtaacaaacttaaatttatatgaaggtgtttttctttttcttagcaatgtgttttctgatccttcatctcattttatctttcctattcttttccaattgtgatagtggaactaattcactgagcttcagtcccatacaatatcatgcccagtatacaactgagcagagagacaaactcagattacttgattaccttgtctttgaaattattactaatgtcctctgcaaagctaattacagcttccattgtattattagagaaatttttcatacctcacttaggaagcttgtattgtaaatctatacttatttgcccaactctctctccagattcctgagtgcattatcttactcatctatgtgccccagtgtctagcacagagcctggcacatactataaatagatacatatatatatatatatatatatatatatatatatatctgtacaaaacagaatagccagatcacttagcccatatactatagtcattactagaacatagcttgtaattatatttatatatatatatatatgtatatatatacacacacacatacatttatatatattttttgagacagtctcgctttgtcatccacgctggagtgtaattgcacgatttcggctcactgcaacctctgcctcctaggtttaagcaagcacgtttcactaattttttgtatttttaatagagatgggatttcaccatgttggccaggctggtcttgaactcctgatttcaagtcatctacctgacttggcctcctgcagtgctgggactacaggcatgagccactccacacctggcccatactagatagttttaatgttgattaacataatgcacacatgcaagtgttaatgcataagcaaatggagcaatttaaacaagatgctctggtaggtgctgaaattaagagaaaatgttcagtctcagacattgttcattgctgctttctactgggctgaaaaatgtcatattctataaaatgtatcaagtcctcagaattaaaatgtcactgaaccccctgacagaccatgctatgctagcttgatatttgaaagcactacaattcattatgccaactgctgatactgttccaggctatggggcatctgctgaaaatgatgggaaataaaaatctgtgggtcccctggaaaggaaagattctatgtttgaaaagctgaattccagacaagaactcaccagatgctttgtggactgaagagctgggttccatttccttggggacctgagcagatgggactccctgaatccactttcaaagaggagtgtctatggcaaggtgcctggtttctgccccaattgtttatttcccttgcctccaaggctacaatgcacagaagtgaacttatccttagcaatgtatagagccaatactttagaaaatctaaaaatctagaaagtacttccaaatgtgttttctgtgcattcctgtttgtatggctggctacacagtatggaaaataaagcaagcattatcttagtttgccttaagaggaggaaaagtgtgcaggctgccagagtagggaagaggttcacagaggtaacagctccagaccaattcaacccggggagtgggaaagattccactgaaagctcatatataactaactgggcatctgagaaatatttcctgctgcttcttctccccaatcagatcttcccttctctgacatcccagcaatctaggctgcatttttctgttttcttttccctaaaggttcctacgaagctcatttcgtctaattttatctttataaaaatactgagaatgagagaagtgaagtgagattgtaatatgatacggggagcaacacagagtggcagttacgggcaaggatttcgctctcagattatttgggtgggagcttagttttgttacttactaattattttcccctaggtcagttacttcacttttcctatctccatgtcttcatttgccaaatagggatagtatttatgtgtacctcttttcatgcttagagtattacctttgcaattatgaagctctgagaaactggtggtgcatccctctctgcaatataataatcataatgtattcaaaaaagggctagtaaagacaaaataccagaaatccaccaaaaacttgttttttttcttcttcttccattactccctttctgataggtttgaaataccaagtatcaaattatttcacacagtttcatggatttgtttttgcaaagttgttgttttactgtgttcctgatgcccccaggcacatgcctcttgggtaactcactggatgttgttgaaattttatgagaaataaaaaatgcttaatatgttattattatgctttctctggaatatgctgactcccttaccccttcagcaaaagctcctacttttcatgtacatttgtatagagcctagtacaatcataggcacattgaggcactacagtgtttatgccatgggggtttgtttgaatgatctgatgcaggtaaagtgctctactaacaggactatcaactcagggatggcactcacagccatgtgttctgttgaggtctcatgagttctcatttgcataagggaatgattattattaacctgcgtgcgttattgtgaagacttttaaaaggaaaggaggatttttgcagtctactattctacacatgaaaggaggcaagggtaatcgacctctgcatttaagtactgacactattacagtagaaggactgaaatacatttcaatatttccgagatctagaagaaactaggctgggcctataacaaactgggttaatgacacataagaatttgtcaaagcctttgacatttccacaaaccccatctagctttcttgttaaagttttcaaagcaaaactatcatcttccatgttttaaatcaggtagaaaaaaaatttctttctatacctgaacttctgccaaaaacattaagcccatttgcctattctagatgggctaaaccagcctctctctgagtcactaaaccaagaccttgcctctaggaatacagcacagagaagctagaaaattgtcattcagccccaagccatcatctctagtgctcactaggctgtacagaatagaacagtcagagcacttagctcaaatatatactattgttattattagaacatggctactttgtgagtcagcccattccagctgacacaacaaaatgacatactgtatagtgcatactgatcctacatgaaacacttttaatataaaagttagcctgtagccacagtcagtccactggtcaaaaattgagcatctgctgcgtatcagcctggccaatgcatgagtacttgagtgaagggacttctttgcattttctcataggctattaatcttgcgggcattagcaaaatctatcttaaaatgattcatacaggccaggtgtggtggctcacgcctgtaatcccagcactttgggaggcccaggtgggtggatcacaaggtcaggacatccagaccatactggctaacatggtgaaaccctgtctctactaaaaatacaaaaaattacccgggcatggtgacgggcacttgtagtcccagctactcgggaggctgaggcaggagaatggcgtgaacccaggtggcggagcttgcagtaagccaagatcatgccactgcactccagcctgggttcatataagtgaagatgtatcaccacataaaatcaaggtagtattatccatagttctataatgatatggtaagtaaaaatatgtggatctgtatggaaaatgtttaggaaaaagtgaagtgggaaagcaaaaagcaactgtcttcccgaaagagtgagggatgaggcatatgggaaggtcaatgtaagtaaattgtaaaatggtaccaaccagtatatggaccatgacaaaataataagagaagagaggcaataagtcagggacctcaacaaggaaaagtctagaggaaatgaaaacctggggataaattgtttaatcatgactttggaatccatgtgagttctctgccaactaaagtagccctccctcctctcatctggcatgatttccagacatcactgaagatctctttttcctccaagttcctgctaggttaatttatccatcaggtccaaagccttttatcccaaaattggaataaattggaatgcaaattctgccatgagattttgttcttacgtgtaaatgacagatactctattcctctctgagcaaacaggaaaataagcaaaaaaggggaggagcggggagggatagcattaggagatatacctaatgtaaatgacgagttaatgggtgcagcacaccaacatgacacatgtatacatatgtaacaaacctgcacgttgtacacacgtaccctagaacttaaagtataataaaaatatatatatatatatataaaataaaaaaaaaacagaatatccccttttggaagtagaagtagattaacctattaaactaatatcagccattcaaaaaaaaaaaaaaaaaaaaaacttgaggaaccaaatttgatgaggatggtcaaccacagaagtgcataaattgagaagccttcaaaactttctaaaactttctctgttgtccaaaagaagaaagatagggattaaggggcatttgcaggaaggaaatatttcatctctttcccagtgttgatgctggtacactgtgatgtgggcacttcatatggcagaggagatcacacagatttcattaaggaatcaatcattttttcctcaaggaaaggaatcaagcattttcaccaataaggtgagggaaaatgcttacaaaagataggatattttccaaacctcatctacctcagtagcatcttccagatttgtggcaataaatgtttctaagtgtaattaaaggctgagccgatctaattaggttgatgaaattttcagtgggacttcattccccttagcatttcactcattttttttctctctctctagaatacttccttaggcttaatctgagcaatttttagtggcagcattctaagttacctcacacaggcagtgtctccactctgattgtaaaacctccagcaggtacatatgactaaaaacaaacttcaaataaaggattctaggttgttttatttaacacacagtcctttcctacctcttcagtttcatttccttactaacaaactacgttaaataatgttcactctgcaggagggaaataagcatttcagagcatttcgggggcacaaagagaccaggaaatgcataataattgcaggaacaggttctgagggggagattaatgagggagcgccatgacccttcctgataggtcagtgactacagaaacacttatacgatgaaaatattgggatagaaacacatactagtgagattttcatctatctttaaagattcttaaaatatatctagtgagcacctgaagaattaactgtaagacttttctacaggaaaatgctttccaagtggtctaaggtaaatgggcaagatgtcctcatagagtctgagcatctcagacaccatgatttctctttctgcaagattttctaacctcctctccttttgtagcagtcactcaaaaactgcttgttagaaaatttaattaaatataaaatgatcgaaaattcttaagcaacatatatttcagctcttactcagtgttatcaaaatgcaaataatataaacaagtatttctgtcaaaacagtgttgcctttgcaaaaatcagatttagaaagcatatttttttaaagacctattatcttctaagaatttcataggtatgggctgcatataatggcaatttattatttataatttttctttaactcttttttttcaaatttaaacctgtgagtcatttttcaatgagtacagatattttcccagactttgatttacttgtgatgaaaatatgaattatttaaaaaaaactactttgatctctatttgaattcccggccattcaaagttccttgtcattttaaacaaagcaccatatgaagttcaggttaggttttaccaaattattttgagctaatcttattttattttgaaatttgataatcacatacacaaaagtaactttccaattgagggttagttgttctacgtgcaagcaaagtctcatttcaaatagacattattaaatgccatatagggaaagacctaagttgcttctaaggaatatgagattataggttgtttcaatatgttgagtgatttccttttttttctttaatctgtaaagaataaatgtgtaaattcgtgagagtgatatttttatgccttgaatgccattgtttacaatgaaatagaatcggccatttaaatattatattttccttgatagggttctgtattctaatcctgctggacccccttattactcttggtcaagtaacttctctaggtctgtttccccaaaggaagaaagttgaacttagaaaatgatttccaggatcctttccattctaacactccaaaatttcttccatgacttcagacaaggtgttattagaatctccttcaagactggttatgctaagaggcactacatactagactgaaaataaaaatgccatcagccaataaatgaagtcataattaagggtttacacatgcagtgtgctatcgaccaggaagtccaagctagagttcaggaaaatttacatagattttactgttaagagagattctgtgagaatgaacatgggtatatccctctcttttcagtaacttcacaaagctgacctatttgaagtagggtgatttaactcacaatccatgatactttgtcactatttcatttcagaagtaacaagagcagggccttctaaatagataatggttcagacaggatggaaactatcaacaactaaaaagccctccaaagtgctgggattacaggcatgaaccacgacacccagcacgttgggaggccaaggcgggcagatcacttgaggtcagtagttcaagaccaccctggccaacatagagtgaaacccgtcactactataaatacaaaaattagctgggtgtggtggtgcatgcctgtagtcccagctaacttgggaagctaaggcaggagaattgcttgaacccaggaggtggaggttgcagagagctgagatcatgccactacactcccctggggaacagagcaagactccatctcttaaaaaaaaaaaaagccctccaagtgaggtatgttttgatttatagattaattgtgctgatatccttccaaactccagtgcatcagaagaagtaaaatgaaaaagattacacaagtcaagaaaaaagtgaccgtgcttcctcagacacacaccccagatggggaagacagagttggaaagtgtccaatcaataaagaagagtgaattgtatccaaaccctatagtgacaacagcacaagtgaatcctccttttatgagtttagccactgtgaactaacatgtcacttggaagaccacctaacttattttttggtattgtggtttttctggttaaaaggccaatataaaaaaaaatgaatactaaggtaaggaatctttatttatcaattcataaattagaggtgttaatctgaagcacggtttaatttgaaactgttattttagattaaggcaattaactacagttttatacacacacagaaaaaaactgcctcacttatgcagaattatcagaagattatgtgtctcagctgaactcaaggattccctgcaggaattactattattattatttggatgcccaagagttctttagttagattcccatttctgctagagttccctcgattccccttcctttttccaatctaagcaggattactcttctctgtataaagcaggatgtagggactgattatacctggcctggctcacagtgaaaatgaggaagttggtacaggtgattggggatgcggctctgccctccactttccatccctagaatggagtttcagaaatcttctaaaaatatctaattattcttttaccatacctgatatgctttctccatccctgcctgtctaaattagtcactgtttgagatgctcatattctgactcttctgtgtttctctccttgtcttctagaactctcactcatctcaccctctttttaaatcaaataactgtgttaaataatttaataattcattcctcacagtctattattcatttgtaaacattgttttagtttgtaacaaatttgagagtttgtacaatcttttaggaactctaacaaacatttctcttgcaaaagggctcttaactatggtagttaagagcacaaggacactgaaatcagacttcctcgattaagatttagactttcatacttgttagttgtgtgaccttcctcaagaaacttacctgcctcaaacctcagtttctttgtctgaaacatgcagataataaaatgtctacctattttgtgaggattcctgtaaagctcttataatagcacaaaataacagctctggaaatattagtactataataataataataataaataataataataataattagattatcatcctctacagagcttaacacaaacctggatcatactacatatttgtaaccagtaaaagttactttctgaaaggcaatctatcactcctactacaaagcatgggtaggtttggcctttcagaactgcacctcttcatgtttgttaaaactattgcacctttaaatctcccttaggattattctatatacatccacatactgggcaacaaatcaaccagtatgttcacataaagagaagacagggaaggataattcagtagtaattgtttttccctaatgcttaactgaatcaagtttatatgattaaattatttacttcagaataaaccaagtacatcactgcttaccaacagcacctatggctaacagtgaattcaaagttatttaactttgatgtttagaaatctacaccattaaattgtaggcatacaatgtaagaggaacctctggttccagtagcccaaagaaattggattgtgtctgaatgaatttttttaaagacagcttttatggaaaatattcattaaaaaatgaaattcagggacttcttcatctttctctccccaaaacccaacaaattccaatcttatacaaagttacaatacacaactacagctgataatgagggatgaaattattgatgtcatttagtttgatgatcttgctcagataaatatcaagtaaattcaccagataacatttacttcctccagaatgtgttgaaaataagggaagaaaattatgtcattatatagacttattttgttttagttttgttttgaattacatagtcgttgcttctcctataggctaattgctttttcttcttttttcttttaatactcaaaaaagtcatcactgtatgcataacacctatggcatttaagtagaaataagcaagtaaaccatttagctcaactttagacccagtatctctttttgtttgactttcttttatagctaatatcaactgtccacacaaatctcaaatgtaaattacttacagactaataaagaagaggaacctaattccttcataatgatctatgagctgtttccctcccccaatcctacataaacaatagtagaatattgaatttaaagttgtgccgtttgactctggaacatcgggtcttcagcaaaggtgctttcatgctggatctgaaatgatgagaccatgaattaggaatgattctgatggcaacgatatttacctctttgagacagcccataaagttgttactgactggtgaccctggaaggtcggctgtgctgggactgcctccaacatagaaaaagtcatcagaccccagcatggtataatcttcttgcgtgtagcccgttgtggtaagaatcccatccactgatattgtcacctagataacaaagcacagggaaaggacacgctatactcagacctagatactgtaatcctgggatatgcctgttttgtgttttgcttttgtttttttgttttgttttgttttgcttttttctttttttctgtttgtttggtttttgtttttagacctatgacggaacccattttcatgtctgtttgaggtttattcttagattctattcaactagccctaagagatctaaactagttagagagttaactgattattgaactagtgtcagcatcatccctactgcaactcaaaagttattgagcagacacaaaaatggtgttagtaaaatgcttcctaggttagttttgctggtgtacatattagtaaggtttagttgtctgttattaactaatcacaacgtgcaccttgttaacataaaaggcgcaagctatttccagcaacatcactatttgcactattgagcagcaattgttcagcatgcaagtgcctaagtccatgccaaagggagagaaaaggcaaaacaaccagtagaagcggcacacgctgatgtgcacatgcaggaggtacagtacagttcagaaaaggaaagaaagaaaacagggagaaccaaaggaaaaacataaaaataaaaacaactgctttgtgatgacgtaaagatgagtgggtgtggcatctccagcattcccaaatcaagtttccatgccatgcatcatgaatggttagagactggctgagctgcggtcactcgggccagccaccattttgtcttatcccgtgttaaccacagctggatgcaaaacgttcgaaacgttaacgatgcccctacaggtgagttggaaaacagaagttgacaggaacaggtaaaaaataagaaggtcaacaacagatgaaaagaaggaggtcaaagtaagcagaagagtaccaaccgcagttcctcttttgttaatgatgtctacagttaaaagaaagaaagaaaacacacggcaaacccaaaataagaaacaattagaatgatatctaccgaacaatgtagtttgtttaccatagcgtgtccaatgcctgagtgctttgtggagaaggggggagaaaggaaattaaaaactgtgaacagaataacgatcgttacttaaaaaatatgatggtctctaccatgttagtacattttttgattcaggtaacggttagtagaatgaaacattccatgaatgacatgttagttattaagcatgttagtaacatagaaaaagggcaaaaaaattttacaagaaaaaagcagactaacaagtaggcctcccacagaggtaatatttttcctgctattattgttcataatttgctactagacagaaacagacacatgacaatgttccctttgtcttcctgagtacatctgagagacattggaaaagtctaaaagggattcaaaggcctaaagcgtttcagctgaccactgcagccctatgcccatacttgacccctcctccaccctggcccaccccagccccaggaaattagtaggaatcagttggcattgccctactactcaattttacagcatacaaggactcctcctcaacttcaaaacttccttcggtcatattgatggactttagggtcacagtttactgcaatgaaacaaagcaaagatcctgacacatagaatgagtagaatggatttgtgtttaatctgtcctgctacacatgcaccccggctgtataactacagtttcctttgagctaccaattcgcagtttggtttgtaacctgagcaaaggcaaatctagaaagtggactccttgagcccccacccttccttctgtgcttctctcaaatgagcctctggtttctttgtgcatatctgagagaaaaaattaaaaaaggaaaaccaaagagacagacttataggaaatccatggtctacagttatactgatggtggccaatcctctccaaaggcaggtggaagcatgcagggcccctcccatgtcaatgagggatctggaaggtctggggttctcaagaatctttcagttttatttgtttgccttagctagactaaatctacactcctaaagctcctttttctttctctagctcagatagtataaacctttcagaacaggaaagaaaaggttagacagttaacagctctgaaagagagggctgttttggtaaaggaaaaccagagacaatccggtcattctgcaactgttcagagaaacaacaaatatgttaaggatattagtttaagatcagcatgtacggcaataaaattagtcactgtcaacacttaacaaaatgatacactgtaatataaagtttcacataatacccaaaacttataatgttcaatataaaaggacaatctattcattttcattcgtatatatactgtaatcacgtattcattaaaaacatacagtatatgtagacccacagatttagtaaatagttgatattttcctagtatatagcatcttgaaaaagtttttttaaaaaaatacaattaaatagaaatgggcacctagaagattaactggcctttccagagtcatttggggtttaacttaaagcatctatgctaaaaataaaagtatcttcaaaaacagacccttcaggagatatgtaagcccctaaagaaatttttcccctcagggacttctcttgtccccattttggggttgggaggaggagggagtagggactgatacaatcccaaatcacaaacactattttttcgactacaaaaaaggaactgtgacttaatgaccccaatgtgcatgcttccaaatgatcaccatgaaaactacaatttaaaattaaacaaacaaaaaaaccaaaaacacaacaaaatcacacacatcacaggaagggcaggtcgcagggatatccttgcagcccttttggaaattttcatatggccctgtatcaaaatagcctttgggctcccagaactttctagatatgcccctgctcaagtatggcaggaagattcatctcagaagaagaaaaagctaatttgcaagtgactctgaggagccctgtatcatgttgttagagtatttaagtaccacacacacagctatagcgagaaacaaagccagttactctcttatccactgcgctgttacctgacgcagattcctggtgactttcacatcatgccaggcattatcattaaactttccattcacaggctccactagtgcttcaaaggcccctgatcccaaattaatgaccagagagacagctccatttttcagggcaagattgacataatcagccgatttcccagtgtgaagcatcagtccattcctctgaagggttttaaatgacagagttatttcatcactgctgctttgaatggggttttgagacaagtcgtagcagaagtattcagatcctttgaacgtggcaatatattcttcttttcctagaggaaaacagatgatacatacataagtaaacaaatacactatgcaaatcagcaggtcttaacagaaacaatagctaatcactccccaaattaacctgcttaattagatttcatgacatgaactctgtctcagtcaaacagtactgtacagggcagtattttttaaaaaattttattattattatactttaagttttagggtacatgtgcacaatgtgcaggtttgttacatatgtatacatgtgccatgttggtgtgctgcacccattaactcgtcatttagcataactcatcctaatgctatccctctcccctcccccaaccccacaacagtccccggtgtgtgtgatgttccccttcctgtgttcatgtgttctcattgttcaattcccacctatgagtgagaacatgtggtgtttggttttttgtccttgagatagtttgctgagaatgatggtttccagcttcatcacacgtatgtttattgccgcactattcacaatagcaaagacttggaaccaacccaaatgtccaacaatgatagactggattaagaaaatgtggcacatatacaccatggaatactaggtggcagtatgtttttaataaatctcaactattgggccatcaactgcagtagctaaagctgacattcttgaaaattcaattaatttttcagtatcactgcaagagctctgatcagagaaagtagttctgtgatatctccagggcatgaatcaggtaccataaatgcatattggatggttccactctgctgacaacaatggattccaagatgttttcaacattctctccatccaactgaggcattattttaattttcagtgaaacatttatgttcaaagatctttttcaatgaagagacaaacagttttatcattgagagaccatagaaaattatctggtaaggagaaagggaagaaaaaaagatagaatctggtctgggagtaaacagacctcctacagagcatgtgcattttttatctctggatggagggagtagtgatagaaagtctaatggagtcagctggattactgatctattccctggtgtagttaagcagatggtagggctggctgttatgacactggtaagaattctagcacatcgtcatggggatagcatgtaaatgaagtctcaacattttctacgtatcttattctttaccagatttaggagtaacaaggcggctctcacgagatgctagacagatcaaacagaaaggtggatatttggaaggaacagtcttctcccactgatgaggtgagttgaaccaaaggaagaatgtaagccataagaccccttgactttctaggcagtaatgatgctgtgccaagaaaaatgagacagcatggttgggaatcagcttctgataaactataaacatataattataaacggtactggagaaacttaatctgtcccactggcgacatactatcactattatgcccccgagagggttgatacatcagcaggtgttgcattctcccctgtaataggtttttaatctcaggactattttcatttgattgtcaaataactcacgtcctggaatcagagctcaaatcgctttcaacgcatcagtgccagatgatctgccttcctggatgtagaaaatggccatcagtggctacaggtagtcaaaccatagcaataaatatcacggtgagcacctacaggtattcaccaggaattgagccctggaatattagtcattgactactagcaaattattagccaagactatcagtcagaccaaataattctgagtaagtcataggaaagacctcccaatctgtaatagtgaatccctcccattcaaacgctcagaatattggctgagcacctcccaagtgttaagcccagtaccagttattagagataatgaagtgaacacaatggacttaattcctgtctcggaaagttatagtccaggtgtctgctcccctggtcagtccaacatggcaagtggttcaatattgggcacaagtacaactatatattactattatactgagaggaaaatgtgggtcaaaatatgagtttggattgtaggttggccactagctgtcactagaacaattatttgcttttcaaattttggtttctgaaaatggttagagataccaatctttcagaatgaatgtgaagatacaatgagataatgtctgtgcagacatctggtaaagttgatacgctggtgataaatagtcaatgtcttcctgcttgcctaattaatgtgataaatgtgataaatcatctaaaacaaacaacataaatcgtatgttattatgaaatctagaattttctctttaagataaaaaacaggacaaggattcccactgtcaacatttatattcaatgctacacttgacattgtagctaatgcaggaagacaagaaaagtatatgaacattgtaaagattataaatgaagaaaatcatgtgatataagcaaatatattgcacaaattgaaacactaaaataatctacagaaattatttggcttaataagagactttggaaagaatttagagttctgtgtactagagacaatcaatgtttcaacatatgtaaatagattcatagattcaatgaaatcctaatcaaaatctcaaaaaatttaaaaaaacaggtaaaaagctgattcttcacaatctatgagaaaaaaaaagagtcccaaatagccatgatatgccagagaaagaagatgaagtaagttgcctgcgtaaagatggacatttattacaaaattatagtgctgaagaaaatgcattaggataggtaaaatgaggagaataacgataatcaaacttaaaatattcttaagcatatatgaaaacaatttacactgtcaagcatttcagataagtgtgcaaaagatagattagtcaataaaggttactgggacaatcagttattcataagaaaaaagtgaaattggatctttacatcctttgttcacaaaaatcaattctacatggatgcccgatttaatttagagaggcaatctgtgaaaacttgtcagacaataaagtttgatatggaagaatggaaggacttctaaaattagcataaaggcactaataaatattgatacactcatctacattaaaattaacaatgctgggtcatcaataataccatagagtaagaagttaaataacaattttggagaaaatattttcacttcctattaatcaacaaaggattataatccagaatatgccaagcacctcagcgaatcaatacaaaaataaagacaaccaatgaagaacacacacaaaagaaatgtaatttcatggaaaaacagatatgtattgcttatgaataatgaacagatattcattcctattagtattcaggaaatggtaaaaatcaaactacattcagataccatttcatagccatgaaattgacataaaacgaaaagaaaagagaataattccacattttgccaaggctaccgaaagtcattcttatatactgctgatgctgataagataaaaattgaccaactgtaataagtttcttttggcattatgcaatcccatgggaatttcacatattacaaagaacttgggtctcagtccttagaaaatagttaaccaggatcagttaactaaacatttgccaattccttcaactcatttgtcattgcttattgttctgctcatttgatgataggtagtcaagtgggttctggttcatgtatgtgtgtgtgtgtgtgtgtgtgtgtgtgtgtgtgtgtgcgcatactaataattatatatgaaaacaatttatattgtctggcattgcaggtaagttagcaaaagatacagaggtcactaaaggttgctgggactattggttatctataagagaaaaatgaaattggatctttacatccttttgtttcccagaatcaattctacatgatgaaggatttaatttagagaggcaatctatgaaagcttttgtcagacacagacacacacacacacacacacacgagagatccacttatctgaatatggtatttgcaaaattttacattcccactgaataagtagatctctgagtcagcaggagccttaaagacaatcctgcagcccaacccattaatttacattattaagaaagcgaggctcatggagtttatatgaccctcaaattcataaaatgtgacagtaacagaagtgggactaggattcagactactaatccagatactgtctaacatgccacaacacctgtgtgtcagacagaagtgatatatagcattgtgaaagaaagaaaaaaagagaaaaaaaactgtttgtgaagatatgtcttagtaagaaaataataactgtgttttagtctacttagtttaaaagagcaggtaatatattaagaaagattccacttagataactaaattataaagttttggagcttgaagagttttggtccagtaagaaggctgtagaattttatccaagatatcttgtatcattccaaatctgcataactcagaataaatctcaacaaaggttttgtttgccagataatgtggcatacccaaggggttaaataataaacagtttgcaattcactatgtaataaactttgaagttatatgggtgttgatgtatttttaacactatgatattccccttacttaaaaatgaaaatatatcatttcttttgtattgtttaattccaaatttaagtaattcaaatttacattaaaggcaaccacatagttttggaaaaaattcagtctgtggaatatgcaattaccttaaaatgccataaatgggacataaatctaagcagggaaaatatttcttcctatgttctttttcatgaaagaacatatatactacatgaaaatacaaaaatcactttttcacaatatataagaatattatgtttcatctaatcatttgctaccttacaatctttgtaagtaagctttgtgctattctataaacaaatactaagcagcagagtgtttacatatgtgtttctgctgaacacttaaagaataagtctacgtccatttttaaatacaagtcccaaataacttttgcatttctactatgtgctaaaacaacgaaaatgaaaaagaaattagacccaaagccacgtaaatgtcaataaatacttatatctaggatacaaagagacctcttacaaatcaataacaacaacaacaaaaaacaaaaacgcaacacaagccaatgggaaaaaaatgataaagtagttgaacagacattaaagtataaaaggctatcttcaaagaaatgcaaagtaaaccataatgaaataacagcacactccacagaatgaataaaatgaaaaatacaaaaaaatccagtgtcagtgaggatgtggggcaactagaactctcatacattattggtaggaactattttgtgaaattgtttggcattctcttttaaagctgaacttgggcctaccctatgatccaccaattccactcataagcatatatccaacaaaaaatacacatatcatcagaatagcatactagaatgtttacagtgttaccctgcataaattatctaaaacttaacactactgaaataacaaccaataatagaatggataaatttcagtatagtcacacaatagaatattaaataacaatgtgaatctatgagctgcaactgcaacagaaatacagataaatctcacaataataatgtttagctaaaaaaaatgcctgacacaaaagagaacatagttctgattccatttatataaaaaatttaaaaacatgcataactagcctctgttgttgtaaatcaagacagtggctatgcttggtagagatggagaggggatagtagtgaggagaactcttggggtacaattaatgttgttcttgatttaagggttgcctatgggtgtgctaagcgtgtgaaaaattaatttacctggacatttatgctacatttatcagcataaatactatatttcaataaaatgtttgaataatctggatgattaagcataaaatgaatttgtctgatgaagtattttcttcctgattaataagatgatatgagaagacactattcctattaatgctactattaatagtaaaagctaaaataaagccaatagtaataatttcaattgtcactttttaaaacttttcaatgaatattaatatcctttaattaccatttgctcttaagagtaatctctcaagatttaaaaaatatatatatacgctgcttggtagtaattgtttgaagatccatatcttaaatgtgttgattaatggattgattcaagatgaaaagagcctctatttctagccacagcaatgttatgataaaattgggaaaaagtaatatttaaaaatttgaagcatctttccaatagtctacaacaattgattttatgttgccacacagttggaggaaaatatttaagagtctgccatgggatttcagtcccattccatatccgacacactataacttagaagaaaattcacagttcttgctcatctaattttctgagagtaagctcaactttaagatttttttgatataaaaacaaacttcttatagaaaaaaaagttaaccattactgaaccacttcattggatgttgtagaaggtgttcaatccttagatggtagattgaacaaatggattggtttcaacaccaagaatcactgatttctactttacgggaaaaaaaatgttaaacaaagataggttaaatgacttcctaagttcacacaaaaattgattctcaggacaatgctcctttgcattaccagtgcatagaatataatctcattaatttgacccaatgcctctgtatcttctaacttcactgaacttcttcaccaaataaataatctgcaaggaaattaccgtacatcttaaagacaaggatgcctgcgggcagaacgaagtcccactgtccccagttacatgaagaatgtcaagtcatttttgtatgccaaaaaactagccaatattattattcttgattatattgcttttcatacatataatcccaaatcacacaggttggaaggttttactatagttatatgattcaaagattatgttcaacataaaccagaaactaaaatcaatatatgaaaaaacaaatgaatgaaaaaagatatttgggtgagagccctgcttcatttatttttctattctagaagtcaaatacacaaaaatattgtgccaaaaacatccttgaccaagcagatgtacacattagaagtctgcattattaaaacaaataagccaggctgtctctgctataagataaaacaactttagaaaagcagaaaaggaatgtctgcttattgaaattcatatcaaattaaatcctcagtccttaagaaatttactattatcttatttgccacgaactgtgtaactgagaaattaaaacaataaattgattattacaagtaaaaatcacattactttcaagggagagtagttcactcattagattttctacgtaatatatgttgtaaaatattctaaaattaccaactatttttcaacatatgtaaattctgagtctaacttctcttgttctgcagcgagtaatcaagatttataaaatattcactcttcaagacttatctcacttaggtaaacctcgagaccaatccagaaataaattgccaagcttctatcaaataattcaaaaggagacccaggactcttgatgatacacttgaagtcactaaatatgaaaggtaagttagacttagacattatttagtccagtgccttcatttattagatgaacagtgtcagggcccaacagacaaaactatggtcacataactaactgaggaaaagtcagaatataatccttgccctcttgataacagtctcaggttcttcctaatttctagatattgccataaaatgagcttctaattcattaccaaaaactaaatgcagcttaaatttgaggatatttctgcaaaagaaaataggacatgttccaaaactctagtacgataattttccaatcttattgtgcaattgatttgcatttgttaaaataaccaaaggtgctgagaaccaaacaggccattctgtgtctggctggactgactagtcagttctacatataaaatgagacacacagggaaaggaatgaacaaatgatcctggaattcattaggtgtgcaacatttcaatttctgggactgactcagattcaagtacctacaatgtaatctataagaactagatgctgtatcttttaacctgaagaaaatcattaacacaatcaaaattaaaagtagcttcatgaatatggactttataaagattctctgcaagaaatttgaaaatttctgggtgccaattaatgattacttaataaataagtaaattataataatgttattatattcaaggagatgtataggtattttgtatttataaacagtcctcatttatgaaatggatatgaagtaaataaatttaactatgaaatcatcttattaccgacttggtcaaggcaatatattctgagcaatttatctatttaaccaaaccccaaagaatagccaattgcttctttctccctagaatcagactggggtggtctgtaactctaaaaatctataatttaatttatgcaaatattgtggccatcttgtaagctgttctaaattatagaatgtatttttttaatatacacagatgatagcatcttggaaggcaagagcagaggaaaggagaattttcacagggaagaagaaagagttggtgaaagtgaaattgctttaacaaaataatgatctctatacctccttctcgaactgtggtttgaaggacagtatcatcagcattacttggagcttgtgagaaatttagaatttcaaggccccctcgaccccaacttactggtgcaaactctgtattgtaacccgatccccaaggtgattctagtgtacattaaagtgtgagagtcttgttatgaatggattcttatagtgctgcaatttagaacatcttttaagaattataaagacaattttgtgtctcttgtatctgaaataagtattaaaggcaaaatatatattgatatcatggcactgttcttaaggaattaacatccagatgaattattttgcatcttttcattggaaataaaaagcccggggctgggtggcgggcgaaagaatcagagagctctgatcagtgtgtagatgtatcaatatctatttaatatgtactccagcagagagtccaggctttaaatcattggaagcaatctctcaatttttattctcaacatgtttcacctttaggcaatattacaataaaattctctgtgggtttgtaaacttagtgccactcttctggataaatgtaaagggtgtataactcctggtatattctaacaagtcatcattattggtgaatatacttaacaagtttcatgcaactgcatttacggttctccctagaaatgtctttgttcatacactgctgcaactgaaaactatcatgcattctggatgtaaactgattcaatgaaaacaaatgggcctgggctgtcacatttccacttactatagtcaagtgaacttggaacattttaaagttagtaacacttagaaatgcaagaaatatatactgctaactcaaagtatcctatgttttaaaaaagaatgacagttttttaaaagaaagaaaaaaaactaaaattatcttgatatccccagcacattaagtagaggagagggtaataaatatgtgataagtgtaatgagaaatcatgctggatgggaagaaatgtacttttgtaactccatccattcgtgtgcttcatagaaggcttgaccaaggctttttggtttattttgttttgttttttttttcagatggaatgctactttgttattaaaataatgcaaagaagtaggtcagtatacactaaaatcagtataaaataagaacacttgaattgttgcataccattcttcacagtaggagcacaagagaaggaacactgaaaacctatggcatatctttgatttcaacacagaaagagcatagaatccaaaggtttaacacatgcaaatcccctattctagatattagaaatacaacagtaaataaggctctcagggtctccactctcatcaaaccagtgatggagagataaccataagtgagtcaagtataagtgagttatatgtgaaactgagcaagcaaaagagtgcaatgagggtgtgcaataactgagcagggaagttgttttagatgattggggaagctttatgagacaatgatgattaaattgagatcttaatgctgaggaaccacttgtgggaagatctggacaaagaatagaaagaataggaaaaaatccagtgagcattgagcacagtgacactggggcaatgtgggaatacaatgaaatcagagctgtgggatggggctatgtcatgtaagtccttctaaattttgggcaaactctttgattttattcgatgcacaatgggaagctactagagttttatagttaggggaatgacatggtttgatttacatctcaaaaatataactctgtctattgtgtggaaaataaactctgcgtaggcatggaagtgacagcagtgagtccaacatttatgaagttatagaacataggagtacgggctatgaaattatacatatctgggttcaaatcccactcacatgagcagttgggtaaataatcaccttaaagtcttagttttcttgtcagtaaatgaagacaataatactaggatctattttatagggtagttgtaaggattaaacaatatatgcataataagctttttaaagactgtcaatccatgggatatatttgtggaatataaacagaatatttatgtatatatgttatatttcttcatctactgcttttaaccattaagttacttcttttccccatctcttaatatcttgggcagaatcactgaatttgtggtcacttttggtttttaaaagtttgggctaatttataagttaatcatgtcatcatttttagttgaagtggaggaggaagatgtagtatgcctctaggtgtcttaccatcaccgccccctcaagacctggcccttccagtttattgggaaggagctgatgaggggaagagaaaagagcagtggttattcatatagtcctctttctgtgggctgtacctgcttctctggttcacccttactgacctctgctgcccttcatgcagtagactcatgagtgctccatgtgacttcccaacagcagtcaacaacatgagagaaattcatctgtctcatcccccagctcatctcccagctctaaccttcacacaacaccccatagcatctggctgctctaatcccctggcccagctagtggccttcttgtgagtaataccggctaggtggctcaagccaaagactcaaagggatatctcctttactgatgcctgtgggcattctggctgcaccgaatgttgctggtacagattaaattcttcttttttttttttgatagagtctcgctctgtcacccaggctggagtgcagtggcgcgatctcagctcactgcaacctccacctcccgggttcacgccattctcctgcctcagcctcccaagtagctgggattacaggtgcccgccaccatgcctagctttttttttttttttctgtatttttagtagagacggggtttcaccatgttagccaggatggtctcgatctcctgagctcccgaccttgtgatctgcccgcctcggcctcccaatgtgctgggattacaggcgtgagccactgcgccgagccagattaaattcttcttgtcccctctttctaccctgccagtcctcttcttccctcctcagaaaggcatagggcaggccagcaagtctgatgcatacaaagtcatgcattgggaatgcagaacaccagctttcatttctttcccagcatacacaggctctacatgtgattctatagtttcttccctcaattacttttggtaaaaaaagctaacctcttcattaacaatatgttttacagagcctatgccttaaagactctgtgctgacctatccgtcactgcttaggtagataagggaggtgggaagtggggagttagaagtagttgaagggtcagtctttcggtcctgtagtaaatgctgaggaaggttaactggccagtttagggaggttccatttacaatgaaggctacttaaattcttttctttcagaaggttctaatcaacaattctatgagaaaaatttccattcaacatatggtggacaatcaattaatgttagatattatgatcattattattaaagtaaccactacatttaaaatcactactcagcaattttaaaaaatcagctttttaccaaatgttttattgcccagaatatcacgatgcccaacaccctcattctaggagcacttggttaattaaggctcattacataagaacgagattgaagtattgtaaatagaaaaaaaatacatgtttctattgatggtttattcttttaaacaagtttgtgcctgagtaacttacaaaataattttataaaatatttgctatttatttatttttttatttgctcagggaaacgcatcaggctaagaattacgagagtgaaacactggtttcttcttggacacttttcagctctgccctttaccaccctacttagcctcactgggcctcattttccctcctggcaaagtgacacagtcagactaagtgatctccaatgtttctttccattctaaaactctatggttctataacattctcgatttattgagccactgtttcactgattcattcaataaacatttattgaagcccaattctgtgccaaactcaattgctctcctgctgtcaaaatcaggcaacatgctagagttaaaatgtctttaaagatttctgatggctgctgcttttaaaaggaacttcccatagcaacccctacctctttgtgcttctagagctagctctcctattattctgtgaggacttacaaattcagaaagacaaaggaatatggaaaggcctggtattcacaacctactagatgtaaatttcctattcctaatcacctttcttccacaacccagaaaacaataccttcaatggatttgctagtgttacagattgtgtttgattatttgtccccaaatttaaagtacttcttcatataattgcaaatatacgcatagaaaataaaatattttaaaagaaagctaatattatatactataagtcttaatttgagattatacatatttatccaataaaagtatagaaggatcaatcaatactgactagtgtttccctatgggctccatggatagagcccataatttgaaattaggagccctaggttcaattcctcactttatggttggtgctatatgtccaagagcagtaaatgtagctgagtctgactttatttcaatataatgaacatagatattctgttatgctgcattttcagatttttaaaaaattaagatctttaatataaattatgaaactgttcttattaattatatactgggtcttccataacttcccgttaccccatctatcatacctgtattgaaaacatcattaatcaacattctctagctcagtatttttcatcccagattccctatctggtttgagtactgttttctcaagtatctgaagggtagtataaaaccagcatcattccagatgcataggagataagttatttcattaaataagacagactccttagggttttattcccgtcccaagttcaacagagttacagattaagtgcaaacacacagaatttatgagaaagacttgaggtaactcacagaatagaaggaattgctaaaccacgaattcttggagaggaagatactctgggtaaacccaaactcttgaactcacagttcctggtctcctctaggtttgcaccactcatataattgagctccagtgaacttgaggtaattcttttcaggttctgaattccccaaatcagaaaacttggatagctctacttgtgttagaagccaattcccagatcagtctttgtggctggaatagggatgaggggacaagattataaagcagggacatgccagagaatggctgtgaggggacagcctaatcattcattaacacctggtatggtccacaagttagtatttagatctagtatttaaaaaaaaaaattttcctaggatgatgaaattattaccatctcttttttagttttacctttgacataaatttagatcttaggatccaaggtaaataatgaatttcagctgaattgtgacaagctttatttcaattgtgcatctttatcagagatctaagctaaacacagaattataaactttatagttggaagagggagatccataacatttacgagactttctctggtgcacaggcgaagttgggatgaaaaactgggtctctagatcagttgactcaaaacagagatgatcatcagaatcacctggaaaactttctacaagagtatatttccaggaaccctacccacttccactttaacaatattggggtggatctcttgctaacatattattatttttttagtttctagttagttccaatgaccagtttattttaaaactcaatgttttgcagtttttgcttttaatttttgttaaagaaatgggccttctctcaccttattctccatgaaaataattcacatcccaacaaatagcacaaaatacacaataaaatagacacattataagagaagcaatcaaaaagcagagcacattgtcactacttagtttggaagcaatttcattggttagagaacattctggccaaactgaataacactacctcttgaatatgtagttataattcacaatacttccattcacttctcagagtgagcgttctctggtctcatggataggacgcattccacattcacaggctccaattgctttttttgttgttgttttcttttctacttgtgggtaaaccaaataccatattaaaacaaattatttctccttttaaagatcattttccttgacagtatatggcaaaaatatttgatatattttatagcccatgcttgaaataagttgtctcctccaccattaaccatatgatatgccttccctaccaacaattcacaaaactatacaagttaaagagatcttccattcaagggctttgaaaaatttcttcccagttacccaggacacatatacaatacctcagctttctaccctcaatacactcttctacttgtgataggaatagaaattcttctaaattgatttcataatccaccaatggttcaccatccaaactttggaaaacacaaacgttattcaacctttccattttatacattaaaaaaatgaaggtccagggaagttaatagacttggcaaagaccactcagcttatgaatgcattggactagaatttggctttatgaccctatatcctgtgttctttctatcacacttttatgcatttatcatttttttctttctttctttctttcttttttttttttttttgagacagattcttgctctgtcacccaggctggagtgcagtggcatgatctcagctcattgcaatctccgcctcctgggttcaagcgattctcctgcctcaggctcccaagtagctaggattacagactcccaccactaggcccagctagtttttgtattttcagtagagacagggtcttaccatgttggccaggctggtctcgaatgcctgacctcaagtgatctgcctgtctcagcctcccaaagtgctaagattataggtgtaagccaccatgcccggacacttttctgcatttttaatgccattttggatagatttaaatggacatctttacagtttcaggatggaaatattcattctgtaaaatacatgacagtctattttttcatcatgacattccatcctaatttgatccctatcctagatacctaattttataactccttgagaaaatatataaaattataccttcataactttcatataatcaaacaatattatcatttttctgttacaatatcaaagtgaagtaatcatcccaactacctcaccatatttgcactaattatgttagcctctcaacatcaaattttgttttttgcagtttcttttcatatgtattattataaaattctttgactcaaatgttcgaatattcctacttaaaaacagataatggattttattttgatagaattcccacaataggaatagactctatatcattttgtaataaaaattacattaaatacacatcacaatcttgacgagaagttaattattagcaaatgctaacaattaccaggcatctcaggctaaggtgatgtgagaaaatgtctagtattcataagttgtcaaattaacatcaaagcaatatcaactaaagagcattaaaaaatagcaatgccttggccccagaccccacctcaatgttctcttttaattatcaccataagacttgggcactgggagttttagaagcttctcaggtgattctaatatgtggaaatggtaaaaacgcagagtttagagagatatgacctaggcattcaatgtgtaatatctgtggctctataactgtataaactttgtgtaataatatcacaaaaccttatggttctttaaactaaaattatactttagatatgatctatgtataatattgccttaaatttgcatactgcttatgtaacttatcaggaaactggcatattttctcttataaaggagaaacacttaaatgcatttcttcctcccctttcccaattaatatatgcttagatgttacattatcagactgacctttgtaagcatctgattttaactctcaagctttctttgtaagggccaatatttatgtaaaaccacacaaatgaatatgcaatcccagaagaataaataactatgccaatattacatactgcctttgcaaaggaaatatcatctgagagtaatataggattgtatcttgcgactgacttagacaatcacatttgcccagatacagagaaatccctaattagctaaattcagttgttttcaattttttctaaatttatgatcgtagcctatctctaaaactcattgtacaaatatatatgctttaagtatttctggtgaaaccttatgtaaccattcaaagaaggcaactgtcgatattatattctaaagagaaggtcatggaagaaagtcttgggataaaataagtagataaagaaataaagacaaagaacaagagctagtcctgaaacagtttaagagaaaagtagacactccatccatcagtagcttttcctggataggctcatctttctttaacaagttgacacatttgcaaactgcaggctgaaattttaaacgtctaagctgcttttccttcttctaatagaaaaggtacaaaaaatggtttttgcttcctttactgctgtgccttaataaacatttggctcaaggttttaaccaagccaaatgttgactaaaagcctcctcataaaaggctttaatacatttttgcttgtgttttctttacatgtatttcaatttgatgacaaataatttcttccccatttccctcatttgctgctgcatgttggactaattaaaaagcaggctctttggaagctggaatgagagaaaatggaagagtgggcaggtgggtcaagattgaatgtccctggctctggcaatacataggattctcttcagtgaaacattctccatctagctcagattcaaggaaggcaccgaagaagcccttcagcctttcctacttcaggtcagagttctttttatatttggcatacaaccgagagacatcagaattctatacaaaatggaaagttttattcttcccagcaattccactgcattctgtggcctcttggtgctgtgggcagccttagcagatttgaggcatctcttagggcaaagcggttttgaggtattcttggcgactgggaagaataatttaacttctcttggaataatatcacattcagcagaaaagatctgctgtgctcaaggtcataaatcttggctctgtgaatattcagttattcagcagaacagccactccaagccttcagagcacttttggatgctgctgcaggtgtttcctgtagagaactccctgacatccactgagttcttgcatctgcctttacccttcttgatgctgtccattctgctctctgaacaaacatattctcttacacttatgcacatgtatgaaatcctagagatttccctgaatcaacatatgcatatagatatatgatggacagaataaagtatcaagggataaaatatatttttaattttgtatttcacttgaaaattgtaaggaccattttataatgtattgcttgcaaaataagtcatggaagccctgaaaaattaatcaattcactaatcaaagaaacatatattaaagacctactatgcatgaggcaccatgctaattgctttgaagaagacaaagttgaattagacagggatccagtttacaagatatttacaatgcaaagggggatacaagacatataaaaggctatggaacttaaaaagaagaaaaaacaattctaaagtattgagatacatttcattacaaggcaaatcttagataacatcttgaaagaggacacatttaaaatttaggagatttgaggaaaagatcctccagagtatgatataaaaatgagtgaaggttttgaggtgagaaataaaattaatgaaatttgactcgatctaaggtgacatcatgaagaataatggcaaatgaagttaataagtttgtttcaggccagcttgtaaaaagtccttgaaaaaagaaaaaggaattccttatatttttattagaatatccatcttaaagtgaatggtgaattattgattggcatggatttagggacaattgcatgtcatctttttctgttattagtattactgttttgaagaatgcaatctaccaaaattgaaggtaatagtttcaatgtaaaaatatgcagagttaagcgtttggaaagcactattcaggtttagtatataggaggaaatagggatgggaatggtctattactagacatttttattcttcctacttatcaaatagaccaatatgtgtggaggaaaagccttcttctaaaaagggtttgttttacactacctgtcaaagaggatattggttcactcaaggaaactaagttatattctatttaactgtgagatatattccaataaattgcagtaaacataatcttaaaatattataaagaggcctcagattgtttaaaaatactatattgaatatatgagaaataaaagctcaagatattctttaaagtatatcctatgtaaatgccaatttttctttacagaataaatctaactacaaatgcatacagggcctaaatatatttttatcttgattttgttccttttcttgtgtttaagagccctgactccagaatcacaagagacaaactgccacttcatcacttattagcgctgtttgtgtgggcaggctatttaaacattccaatcctttattttctcctcaataaattgtaaaaaaaagtaatgtttactcagaggttaatgagttgacacttataaaattattagcatggagcctggcctcagatatcattctcttctgtatacaatttttatgtgtttgttctttaaacttataaatcagttccatcagactttttacttcatggcaagctgcttttatttctaattaagaaaacattcctgactccaaaatttataaagactttttctctcttttcttcaagtatttctataacattgtaatgcatttagtgtttatccatatgaacggtatgatattggaatctaattttacttttccacatgtataatcagttcttccgatactgttaagtattgtatcctttatgtaattattaaatatcatatataacagataaaaaactctgtatgtacttacatcgatttctagactccattttctctaaacatcccttgtctgtttctgtgccagaactagactgttttaattatagttgtttcatagtaccttttggtatcatgctggtaacttccctaaactgttacttttctcaaaaaatttaggcttttataaacatttagcttgcatatcaattttacagtttgtcaagtccctaacctcctccccaaattgagactgtgaattgaattgccctcagtctataatttaaagtttgaatcatcctattcagaggcacaaagttgttggttttttttgtttgtttgttttttacttattttggttgtgctttgtacccttccctaaagtgttattattttctttatgtaaatcttacataaaaccagtattttttaacgttcaggtaagatttttatattcctaggatcttcatgtggaaaaaaaaaacttaatgatttaaacagctatattaacttgatatatgtaattatttgagagaaaatctagtcaataacttttgccttcccactccagacttctaccctgattatgttaggtaactgaattggaaagaaaaatatttattctttatattattttttctgatctgaaaaagatagcttgtttccaccagatacattcatattaatagccatcaagctatactactttcaaattatatttatgacaataaatgattcctacaaattttagagaagactatcaaaagcaaaagaaataaatacaaaaattaactgggaacaaataagcaacccctggaggattcatctctatgaccctacagtccgaaactaaagaataatacatcctgatggacggctatggaatgaaataaaattctctattaccagttcactagaagaatttttttcccccaggtttgatctctttatttagtttatcctccaggttaaaagaaaattattcactattactcaccaataactcagtaaataaaaattttgcaaattcagccatttcaacatgccagggaatatctaaaggtgtatatatacaaatatttatatataaattttgcatatgtatataaaagaaatatatatataatatatatgaatataaacattcaggtaggatatttatatttatatataaggatatataaataaaaaatgtatttatatttctttttcaaatgcacagctcttatatacatatttctttttcaaaagcatggctacataaatttcttcattttgatgttctgcttctcttcagtttgatcttgcatatcacagtgcatttataaaatctggaaagccatctaaagaatttcaaactttctgaatacaaaatgtctttttccaccagacaagagtcaccccagtcactaaacaaattgaccaatttcagagtatttcctgcttctacttgttactgatgcagcatctggctggaacagagtgcgactggatgcagaaaagttcatgattgcttgattgactgattttgatgttgaaaatcatgtaaaattcatatatattcaaaatgtgattcaaaatagatatccaaagacacatcccagaaaatcagtgtttttctataagctacattaaaagtttttctaaatcttcatttctaagaaaaaataaataatacaagaatgtatataaataagaatgctacctctggaattaatagcacctgcatctgtctacctctttagcaggctttagttttctttctataaatactcgtcatcacataaactataacgtatttatttatttctacatctcccatgaaaacgtgagctccatgaaggcagggacttttgttgttatggtagtcgtcatggtgattgtttaccactgcatcccagggactgggagagtgcctgtcatgtactaagcattcaacagatatctgttgaattaattattcataattacttaattcacaattttaacatgagcataagaactaagatcagaccaaataagccttttcaaaatattaatgaaattttatattattattatctactacccttttaaactttactgtgcttaaaagaaaaaatccagcttgattacagagctcaaagaatgctattgcctgaatgtaagatcgagaatagcttttctttacatgattcccagtctaaggagagaaagcagatagtaaatcacacattaaacaaatcattcaattacattcgtttaaagtgctgctacctaggaaggaaactgaaatgtgccttgagaacagatactcaactggcatgctggaagggcttccctagaaagggatggtttggtttctaggacttgaagaataaggtctaaatcaggtagaaaaggcagggaacattccaggcatccacaaagatatatagagaggctgagtccaggaagatcttgacaaactctagaaactgtgagactggtaatatactattaggttggtgcaaaagtaattgcagtttttgccatttcttttgcaccaacctaatagaaaagaatcagtacaaaacaaaaggccgctattctggtgtcagattttcttctcacactgaagccagctggagtccttagaactttcctgaacttttctgcatccagcagcactctgttccaggcagatgctgcatcagtaacaagtggaagcaggaaatactctgaaattggtcaatttgtttagtgactggggtgactcttgcctggtggaaaaagacattttgtattcagaaagtttaaaattctttagatagctttccaaattttacaaatgcactgtgatatgcaagatgaaactgaggagaaccagctctttggctgcagatctgagatctttctatgggaggacaaaaaggagctaaatcacattaatctattttccacactagtgacatgaactaggttcaattattcaactacggaaaagtcccctttttatgattcctcaaacggtgtaatttttcctgcctctgtactttcatgttgtctttttttttttttttttttttctctctgagctgttccactaggcacatatttctagaatcagctgaagttccaccatgattctctgtttggactatccttcctctgaactcctccaatattttatgcccattactatacaactcttgattgcatctgagtcccttgaggagacagggaggaacaggacaggagacagggaggaagaaggacagactatgcctgtgaatacagagtattttcctacagagaatatttctaatgaagatgtaaaagatccactcaaaactcaagcattatattgtttgagagggcaattttttttttttcaatttaggtggtctgttttatggtttcttctatggaatatctgtgcaacaggagatcctcttgaataattacccgctgaacaaactgtatctctcaaacacatctcaattttagacttgttgtttaggtcattccctggagagtgtcttgaagaagaaaaaaagcggaaacttacagatagtaggcccagggaaaatataaattattttatatccacttttgagggcctcatattttcttggcttaggtactcaggagacagatataaggcataaaatctttaacattattaaaaccaattcagaaaaatcccttaaccttccaacactaaagcagatagagaacatgaaaactatctatggaactgaaaatcagtgatcaatacatctatgaaaaatgttactattttataagacatccaaagaaatacacaggaaaacaaaatagaaatagcttacaacattcgacactgcttgtgtataatcacacaagcacgtggtatcctaactagtggaaatgcaaagtagcgcatactatggggaatataaattggcaactcatataaagacccaaagaaaagctttactcttgtcctcataattccacttccaagtaatacagcttaggaagaaagtcagggacaagaacaaaaatttgtataccaggatgttcattacagccttaaaattcaggaaagtttgtaaataattaaaatattacactattcaaaaacaagcaatttatgacacaacattaggatggaaaatttgtagtcagtaaaaatcatcttttcacattctaatgacagaagaagaaaaatactccttacattaagctaagcaaaataaatgtagggcatacaaattatactataaattgtactgtacatgtgtgtatatacatatatacacacatacaaataaaggaaacagaccaaaatgatatcatgtatttatttcctttaaacctttgtgtactttcccaattctctacaatgaatatttttatgaccaagaaaaagttaataatattaaataattaatttagactcatttcattatatgcatgaattattccacataaatagctccttgttacaatcaagccaaagaactgtcaaaccatattgggatctacagagactcaatcgccaacaacgacataaggcaaaacctcccacagagaccctcttctctttcacataacactgtattttttaacaatgtttaacagttggaaatgctgagaagccacagatgagatcattaggagaaagtattttccatcatgcttttgtcagggaaaatcccttagtagttctatttctgagttatatttttagccaggctgacaaaatttaaagcaaagtatataaaatgtgtatttgcaagcatctttctctaccaaatggaattcactttaactatcacactgataaagatcatttatcataggcttgtcttctgcatgaccctgtatttggagggtgtgagagactacaagacagaagtggtcaggacctcaaaagatggcacgtgagccgctgcttcaaaaaattaaccagacataccagaaaaatatgatgatgtttatggtctgataggcatctctgtgatctgtaatttatgtatcctatctctgtgcaaccaatggatttaatgggtcagcaagcttcaggaaaaccctaaatggatttgggttcagcaaacagccggtcatcacttctaccccatgcttctaccccacttctacccaccgtgctgaactgcgaagccaaggacttgcttaaactatcaaatccagtttcctcatagaacttttggcccttctatttgtaggtccatctttgcctttggttgctgacatcacattcccagggactgttttctcttgtataaacatatatccatgtaaatccttaaaattcatggcctttgggtttttccttgtcagtcaatctgaatgtccccttcctcagatcctaatagctctgagctggattaggttttccctgatttgcccagcagtgaattcagcttaatttaaaatccactctgcctgagagtttctatttttactttatgaacccataggactgatgaacaatagttagaattgtattcaaattttggatagtttgaattatgtattagttgggaggttcttctttcaaggaaaagaatacaaaattaggtacaagcatgtatacacacatacacacatacacacacacacacacacacacacacacacacacacaaagaaatcacaagtatttactgaatacgccagagctgttttctctgagatttctttaggcagttatctatagacattgtcatagaaatgcttccagattacagtgtggcttcctctccttgtggagaaaactctgtagctcccaaaacttcactaggggaggtgcaaatgagaaaccctagattttaaggtgaagagaatcaaacttacattttccatttgcagaaatgtgttcattagcttagtgagattggttggttttgcttcttattgtctgttaccccctctttgcttgagggtggatgtctgtttctgacaatgatttttgtgaccctgaagccatgtaaaatggaactagtaatacctactgtatcacttgattgttgagaagattaagtgaaatcggagtgaaatggattaatatatcattgtctgaaaattgttacactagaaggcaactccttagagcaagggaattttgttgacaaactagcactcttgctgggacatgatacagagttcaatgattaggggctgatttgcttgaggaatgtgaatgaatcatagatgctataattgcccttgttctgtccctaaatgaagaaaaacgaagcagctgtggtcatctacattctcactgtctaatagccacaagtggtctaaatccagactaaaatacaggggactctggttgcatttatatttatcccccagctgtttctgtctccctattttaccaattccaattcaaaatgctcttagccctgaagaatctgaactgcctcagttgtgcactgtcctctgggtttgcagatgccatagaaatgtctgttctgataataatgtactgagggcatcatgcttatttaacctctggtgaggtagttaggaaaatgcttctgatactgggtaagatcctgaataggaggcccatgctttgtgatgccagacctcttgctttttactgcctttatatacatgataaaacatgatttcagtcagagcaagtggtatatgactcctgacattgtgtgataacacagcacattgtttctgtggagaagtcaacacagttctggaaggatgactcgctttccggttttatgctctcttcccctgaatcctcataagaagctgctctgaagtttaaacatcgaataaaaatgcttccaaacaattaatgcgacagcaaacacaccaataaacctatcggcagcagcctcagtattttacctcagtctttaatgtcagcttgcttttttattccagaggtcagaaaaacaaatgctctgtgagctcattacgtgcatgcctaaacaagcagaaaagtaggtgcttttccaaatgccagacaatgaaatctagatttttctctttgtacttcactgtaattcgggtgatagaatacttgctaatacaagctattaaaacaaaccaacaaacagaaatcagtctctcatagcctattttaaaactccctccctgtgttcttaactgttgacttttaaaccaaaaatgccagtcaagaagtacaaagtgatctttagcactgtctagcttaaaatgttgatagttaatatttgaatataaaaaagtataaaaataaataatagacaactcattttagctaacactttggaattaactttgagtagtagaaaactacacaatataaacctgtttttcagtggtttctgctatcaagtgaattgatggattatagtaacctttgttacctggcactcagaatactacttttaagcacaggttcttttaataagaaactaattgatatccataatgtgacccaaataaattgtaaggtccttgaaattaagttctggaaaaaataagcaaattcttaggcttattttattttttctgtaattctttaaaaatgagtgatctacatgtcatacatgtatatggtaattctctcctgtatagaataccctctggccatcctgaaaaataaaattaactcttgagctttatgagattttctaaagaaaaagtatctctataaagaatgttagactgggcatggtggctcacacctgtaatcccagcactttgggaggccgaggcaagaggatcacttaagctcaggagctcaagaccagcctgggaaatatagtgagacctcatctctaccaaaaataacataacataacgtaacatgacatgacatgacatgacatgacatgacatgacataacatgacataacataacataacataaaatacactgggaggctgaggcaggagggaggattgcttgagcagaggagatggaggctgcagcgagctgtaaacatgcactgcactccggcctgaatgacacagtaaaactctatctcaaaaagaaagaaagaaagaatgttaacttgccgacacacatgctctcttccattctttttcctctccttacaccatcccttcttttttccattactcacaatgatgggattagtacagcttgtactggggctttggaactgtaataaacaaggagcaattttctggtcctaattaactcctgttaaaataagcactgcacaacaatagtctacccagagttgcactgaaaaaaaccacaacaatcctaacactctatgaataatgaaccctatttaaatgagcaggttattgtagggtcttaatgagctgctctgtggccacagggcacatactgcatcccagagtaatggagcattttcctgcagacacttgcaggctgggctagcagcagaacagcttcttccctggtaaaaccagagaggtagcatcaaaggtttgttatgtttccattttactttttcacacacctcttctgcaactgacatcagccatccccatccctttttgaaatgttgtcttccttcttttacctccaggcttctatattcaagcatcctcctcctttatatcttttctgaagtataatttacagaccataaaattcacttcgtttaagtatacaattcaatgagttttggtaaatttccagtgttatgcaaccatcattgcaatctaattttacaacattttcattgcaccaaaaagaaactttgtgcccattcgtagtcattccctcttcccacccccaggccaacctaagcaaacactaatctttttgtctgtataggtttgccttttttggacaattaatagggaaccacataatgtgtggacttttagcataacgtttctgaggctccatgtagcatatagcatgtggaacacaatactattccactgtatagatatactacattttgcttgctcactcatcagttgatgcacatctgtgctatttctacttcttgttattaagaatgctgctgctatgctgtgaacatctgtgaacgaatttttgtatagacacatgttttcatttctcttaggtaggtacctatgagtggaacagctgagtcatatgataaatctatgcttaacagtttaagaaactgccaaaagcttttccagagttttgcattactagcagcaatgtatgaaggttccatttatccatatatttactaacactggttattgttgatgttttccattatagccatcctagctggcgtgaagtgttatcttgtggttttaaccatttccctattggctaatgatgttgagcctctatcatttgtgtctgactgttgtttctgttttattttgttttcattcctcgttttagtattccttgacttttgtaatgtcccctttttcctgtatacctatttcctgatccacatggatcatgttgactcccactcatatgcaattaactaccatatcttaatgaatgctgctcatggctcattctcaatctatttatctccatgaagttactgataccatatgttaaaagaaaaactttagacaaaccaaatctagcagagtttatttgagaaaataaatgatttatgaatagggcagcagtctggaccaaaaatggttcagaatgctccactctaccacatgtgcagtctatattcatgcccatagaaaaggaagtaacatacagaaacaacctgattggctgcagtcaatgtttgccttatatagtcgtatttggcagctttcagtctcttaatggctggaggtttagttgctgtgattgattgagactcagttactttttacaagagtatatacttctagtttaggttatagcttgtaaatacaccaacttaggttacaattcactatgtctagagaaacttttaggcaactcttaaattatttatggaggcagttttggccaaacttaattcaatttcatacatatttctacttggaaaaaaggcaggaaaattgaatttttaatttacacacaaataatgaacagaagttcaaatgtaccttgatttaatgcataatataattgcgtgaagtattagtataccataatcgttcataaatatattgcttttacataagcatactgaccacatgatcagacttgcctgttctcttactgtcttacggacagtgtaggattcactaagctgcggtcatttcctctttagaacctagctgtgatcatcttctctgcctgcctcttactttgtttccttcattttcttttgtgacataatggctgtagctgaagcatacaggtagaatctcactatgccccctactttcttctcttttggccttttcatcttttttttttttttttctggttctccaagtccatttatgcatttattcattctttttctctttttttttatactttaagttttagggtacatgtgtacaacgtgcaggtttgttacatatgtatacatgtgccatgttggtgtgctgcacccattaactcgtcatttaacattaggtatatctcctaatgctatccctcccccctccccccaccccacaacaggccccagtgtgatgttccccttcctgtgtccatgtgttctcattgttcaattcccacctatgagtgagaacatgtggtgtttggtttttttgtccttgccatagtttgctgagaatgatggtttccagcttcatccatgtccctacaaaggacatgaaatcatcattttttagggctgcatagtattccatggtgtatatgtgccacattttcttaatctagtctatcattgttggacatttggcttggttccaagtctttgctatggtgagtagtgctgcaataaacatatgtgtgcatgtgtctttatagcagcatgatttataatcctttgggtacatacccagtaatgggatggctgggtcaaatggtatttctagttctagatccctgaggaatcgccacactgacttccacaatggttgaactagttaacagtcccatcaacagtgtaaaagtgttcctatttctccacatcctctccagcacctgttgtttcttgactttctaatgatcaccattctaactggtgtgagatggtatctcattgtgtttttgatttgcatttctctgatggccagtgatgatgagcattttctcatgtgtctgttggctgcataaatgtcttcttttgagaagtgtctgttcatatccttcaatctaatcagtagccaatatagtgattccattcaaaggttcaaacgatgcttaaaccaaaattattatccatttcacactctccaaccaagtgaacaagaggaaagaggagaacaaagcaaggaacaaaagaataaaaaaggtctaattaatttgcaacctggagaaaacatgtcagatcttgatgtaaaatagaaaagtctggaaaattgggattttccaatatgcagttatgtggccaattttagagatgcaataaactgagtgtgattaaatggtaaattggactgatcaggtgagccatacttttcttgtgaaaagtagcaagcatggaaaaaaaaaagatacagctctatttccctttacttttccatctgtatctttcatatttttcaaaattaaaaaaaacaccaaactatttttcaagtattaataaagaatcaggaagaacttcatttaaaacatttttgcctgcccttcaaaaaactctttcactgtttcaaggccattgcttctggaacccagatttgttctagcttacagcctaggaataagaatatatactttcctgtcaggatggcttttgagaaactctgagaataaaatctgacccagtccaatctgacaaggttgctgtgcttgtttgaatgtaaaatgattcacaaagtgaaccgaaagtttttgttaattgttaaaaagcctcagcgctgtggcttagtttaagagctacatctggcattttggtaggaacaaactacttatgaatgaggaatagttatattttttgtgttgttgtttttatttttcttttggggggggagggaagaaagaggacagaagagaactaggacttagtattttgaaaactgggacatcatcactggcctacccaccacataaacgtaactagtgtatatgattttaactttgtaatcgtgtacattgacacttctttttgatattctagatctatacaaagaaaaatactcaaagagatgcaggaaaataaataagaaaagaaattctctggccagcaattatttagcagtaaattgacatataaatgtggtgtaattaaactcaaatcacttttaaacctaattaccgatacaaagaaatgggaaagcatcgacctctaggcttcagaaagcttaggtaaaatcattacaaatctgtcagttgtaccatcaaaataaatctggaatctaagcacttcttatcattttcattgctgccaccctggtctgagttacccgcattttctgggacttctgaaataacttccaaactattgttcctcagacttaccccacctctcatacaccacttcaccccctgcccccaaacacacaaaagcaaagtgatcttttttaaacttaaagtctaatcatgccccttcttggctcaaaacccacccatgagaaattaaataggcttttaaagttacgtatcaattttaaaagtaacacttataattctatactctaaagagtacctgagtctgtactaggacatttgcttccagaagtcatgaaagtggtctgaagaagtcacaaataggagtttataaagttctagaagtatcaagtttctagattcttttcagtttttgctctgtttaaacattcacaccaactgaggtctgggggtgaaaggggaagttaatttatcccctaaataatatttattttgtatacaaaagaatggttaaatgtattcagtagtctaacctgctcttcttggctattcattcctgaatgacaggaattccgtttgtaccaccctcatcaccaccattaatttcatgatggactagctacttcacagccctcatgtccccaccactccattcaagctcaagggctactgaagcatagtagcagcttacaaagaaaaaaaaaaagacaaaacaaactcttagcaataatgttatgtcattcacactagagacaaaataacttcattattagagatgctatcattgaaattaattcactggttataaaaggaaggctatccaagaatatctgcagttttgatgccttggaaaataaaattaaatggaagagaaattaacaataataactcagaaataaacactattaatattttatgtaagttttccaccttccttgatatatgacataagcattttcttaactcaataaaaactctaaagaaacatagaaaacaataacaacaacttgtgtggtttctcgtctctctcagagtaaaagccaaaatcctgaggatagcccgtaactctatacaatctggtccaccatttcatctgtgggctcatcttcaatactaccctaaagcctccagttttgctttagccacatccatctccccattgactctttaataagccagacagttccctggattttggcatttcagtggctccttcctctgcctgctaaattcctctccaacatgttattcactgtgtgctctctcacctcttctaagtctttggtccactaccacctacaccttgcctttacatgccttgctttatttttctccataaaacttaactactgagtataccatagttaatcactcatgtttaaatattttttcgtccatctcctacagtagaatatgagtgacagaggacagggatcttcattttttgtttgtttggtatacccagggcccagaatgatgccatactcatgataagcagttccgtaaagagcgttattccctgtgacagaatgtcaggagtgaagttgtcaagtcctttttctagagaagtggtgggtgttcttgcttctcattaactaaggcacagcctggattgaagagtagacatgagataagagttctgtgttctgccatcaaaaagacaaaaaagaagtatacatcttttcaattcttttatgcttgaaattctcaccttcctttaaatcacaaggataatctgttgacccttacaacagctctgagctgttattatccacaactgagaaagaaaggaagaggctgtggtatttactgaggtcctaaatggcagaaccaggactagtaaaccatgttattaggtttctgcttctatatagtcacaatgaactgcagccacatctcccagaacaataaattagcaagtagacagaagtctttctttccaccctcaaaagaggtttttagcctttacaattagcttttcaataaagatacaagaataactatttcattgatgtgctctcagcagatcttagactttccattatttatttcctttgtttagttcaatgtgaaagtgcttggctttaatcttcatttcacttagttttatcaaaatataaaacccctacatttgcataggctatcccagggtccagaaagcattcacactttgtccatctgatacaccctcaaaacaacgctagctgaggtaaaagcaggtgggtgtatctttacctcagaaggatccttgacctgcccaatgcgacatcagtggtgagcctcagaaacagggcaaaaaaaaattgatctctttagtgtaaactcaatgtttttaatttacaggaaatgcattcactggtgtgtgtgtgtgtgtgtgtgtgtgtgtttgaggcaggggagcaattacataataggaagaaattatctaaattattcttatttcacatgtcttctagaaatataattgtcacttttgcactccacttccacttcctggcaatttttctgctgccataattcaaaaacagactctttggccgttccttcacattcctttcccttttgtctttacagcctcatcacttccttctaccgatcttcatttcctgcttttgagactttcccgctgcctcctcctgtcatcttcaggtcccaaatgcagttttgccagattccacatccaaaattaacatcatttcctctttggctacactagtaaaggtgcttccttttatccctccagatccatatgtagcccaagtttgaagaactttcttctccctttttagagttgtataagcttcctgagagctggctctacaatctccatactctccagcccacatcacagtacagcactgaaaacagtgccttttatactttgggtaggcataggtatttgagaaatgagccatgaactcaaaaagatagcttcagggaagtcatgagcaagggtgacggcaggaagcactgcttgcctttcttcaccacccaacttctgccctctggccctttttcagtcctccactttgctccccactggcatgccacacatgtgagacagcatgaggtatgactactgttccatcaagtagggaggatgctgaatgcatcaatgacacattgcctcaaggttccattccactataagtatataagcaattgttctttggccagtgcatgtttttatgcagtaaactagttctcattttgctggacatttattacaacatttacccattacaaagaacctcattatgtttaatatatatgaaaacacgttcatttgataggcctattacttgatccattttatttgggtatacaggataacacaggatattttccttcaataaaatagtgagaaatttttgatctaagaagcttcaatatcacttttttttttagtacgcaacacattggtatactgtctgggggcaatctatataaatggaatgaatcctacttaaaaatcatttgttgacataaattattgagaatttcatattttaaaaatattataaatttctttacatttagaaaccaaatatacttctataaatgccacacttatttggaatatatttctgtacagtgtaagttgaatattcatttatatttttctgcaaaaattagttgttcattctttaattcatatacattttagcttcctttttcttttttttttttcccaaatccacaacttttaaaaattttcaacaggacttccctttctgaaagttaatgccttgattaacatttcacaataaattataactatgatttatacttgatttttctttgatttcattctaaattaagtttctattttaatatgattagaggctttgaagaaacaatgggatctgggaaacatacttccgctttatattaaaaaacagatttatcattacaattgttccaagaggactggcctttttctattttattcattgatttatcccaacatctagaacagtgcttggtgttcagggggcactaaacaaatacatcaaatgcctcctatccactgcactttacccactggggacttggaaggtcaggagaggcccttactgtgccagacattatagtaagcaatgtcacataatctcatttaactatcataaatattctttgtggtaactttcaacatccccatttcacagatgaggaaatagatgcattgagaagttaaggttttcatgtaagataacagaggtaataaattgcaaggttagaataaatgccttgaagtctgtctgtctgcaaagtctaggctcttaacaacaccctaagttgcctgccttcacccaaaagtattgtaactagaaggaacattaattactcttcctctatctccacactgtatatgaatattcagactgactgagataaaattacttgcaaaaagaaatctttgcaagtcagtgccacaattaagtcacgacctagtaccattaatctgttttggtttttagaagggtggcattctcctaccttgaaacatcaaaactcatctaatgagaagagaccttgttcaagggtaatgtgtagcttgcagttagaacaggtgagaggcttgacagtagcaagaccgactgctggtttacagcaatgtgaatgtctggtgcttggactttccaggaagcaggccagtgccatatttctggctggctgtctctgacttgaatttagggtcctccaagatactggagcactacctcccagaacctcacgtagtccattcatcaatatatccaacaaatatatatatggtgtttcaaatatgtggtaggcactgatctcagatttggatatatggagataaagaaaacaaagtttctgaccttagaaaattcacaatcttattgtatgtgtaggtgcatgtctgcatatacatcttaaaatatcattgcaagttctttgtgtagtatgaaattgtaagggaaaggacatatctttcattctcatctaggttcatgactagaatcttacctcaagtatcaagtggttagtgttcattcttgcccatatatatatactagtatgtacttttactattcacattttacagagaaagaaactgagtttcagagacctccaggtgactggattagcttctcacagcaaatggtgacaattcaaggttgaaagaatctctggtctctttgataccaaagacaaagttctaatccaccacggaagaaaaggttcaggaaaaggttcacagaagaactcacgagatatgtctgtggtcctacttttagacgtgcatttttttgtggagattgcttcctcacctgagcctcagtttaacatgaactgttcaagcgtaacaacaaattaggtgcatgaatttctctttactttttcagaagccagttttattccatttagcaaacataaatagtgatttcctctgccacattgctcaactatagcttattaatggcttccacttttccttgcttgtgccttaagggtcctcagtaattacccaacagctgtttagacacatagccccagaggctggtatggtctcctatttgctacattaggaaaattctatggtacagcaacatgagtgacagcatcaatataccttcataaaatgatgaggttctatacagctagggtttccccttccttctaaaataactttactttttcatgtcatttagaacccccaaaaaaggattactacttctgatgcaccatctgaagactatcctggatacttttatattaattagaaactgaaatgcttgacatgcaaacgctgtggtagccgtctctccccaggcaggcctgttgttatattcatgaagtgcttcctgaaagcttcttagacttgcagaggctgggaagggaattgtttggtctgtccatcactgcaattcctcctatttgttatttgtattattccttaaggccttcactccctacagattctgtgacagtattgatattacaatgtacatagcatatatttttcaagagtctgagggtacatgtacaaagtctatttcaattcctctcaacaggcactgaaatgctataaactaaacaaaatgtccttaccacagcttgcataatgtagaaaagtatatcatctgcaaggaaaagctgcagattctattttgctttcagtattttgaacaccacacctgccctgctatattcagggctagatctttgcacagggagttagtggccacctacatggtatgttttgaaacatacagaaatggacatcttgctcaacacatacccccattaggtaccaaatgctccactttcctatcttcaaattctagccaagtatgaatggttaacatttcaagaaaatgatggtattgtccaaaaacaattcctacaaaacctatttcttctctaattaatatattagaagggtttagggtaagcttctccaaccagcaacctgtaggccgcaggaggcccaggacagctttgaatgcagcccaacacaaatttgtaaactttcttaaaacactatgagttttttttcttttgttttgttttgtttttgcgattttttttgttgttgttagtatattctctgtgtggcccaaggcgattcttcttccaatgtggtcaagggaagccaaaagattgggaatcccttgtttagggcatcaagtagtaaatcctgaacctctgggttctgaaacaatgagaattttgatcagggaaatttctgtatcagagagtaaggtccaacctaatggtagcttataaggaataagatgaggacactagcactgaaggtgtagatccaggacttcccaacttgagacagaataaaacttctctagagatgttgtaaaatcattgattcttagactctacccccagtgattctcatttatttgacctggcaagacatccagaaagcctaatttttaacaaacacacagatgattctgataaatcattaggatgcatggagcactatttgagaaatgatgcccagtaataataaaacaagatacaggtgatagaggccagagaagaaaacatgtccaagacatcttcatctgcttcgcagtgtttcccagggctattgtgctctttgacttaaaccgttcatcatgtccttttgctcattgaaacaccatccacatactatacatattttttctgcctccaaagaaattattttctctagaaaatcaccttgttccttccaactttgctgcttgttctcacatctctgtcttttagattcatgagttttgagaggattcttggttcttctgggaaattaaccttcggactctcctttgtgcttcttagacattggtttttgtttgagcttcagctctgttccctctgttttcagtttattgacctcctctccatgatctctggtaacaaactgcctattctaacctgaccctatggaacctttaaattggagactgaagtctaagttatctctttagataaatagaaaaaattagagaaaatgcaaaaacacatgtttggcattgtactggtttagaattggctaattctgtttgggttggactaatttcacaattacttgcatgcctttaggatacatgacaattaatgtagtaaaggtaatttcaattcattctgggttgcagaaaaatgtgaatctggaactttcaaatgcatatgcataattcacatatgaatcatccagaattcacaatctatgtgtgtcacagtatgcactacatccacttattgattctactgcaattttctgtatcccaaatacaattttgagcctaaagatttaagaatatttttattactttaacttttcttattttagttggctgaaaatacctagaacctatttcccaatagctgaaaccctgctttctgattctatgcatctgaatctcaatggcaccatctctaggaaaattgttacttaaatatttcaaatacaatctttataaagctcctactatggtcaggcacttgctcaggggctaggaacataatgctgaacaaacagatcctctaggagcttacagtctattatggcagacagacgacaaatgcacaattaaacaaaccaattatttaaatcatttatgaatgctaaaaggaatattaaaatttattgcagaaaaccttctgcattttccaaacagaatgcgtaactttccttctccctcttacaaaagaaaataattataagacaaactaaggaacaaacagcatgcttctctcttcaaagaaacttggctaagccaagtaattttctgctatagcagaaaatatttatcccaaatctctaacttaaaaataaacttttgagaattcaaagtttaaagcgtgtgtgtgtgtgtgtgtgtgtgtgtgtgtgtgtgtgtgtgtggcgtggcgggggcgggtgggtagaaggataggcattgggtttttttctctacattgatgatttaaaaaaaaaattcttctccaactttggctccagaattaccatgtggaaccaaaggcaaagcccttgattcgcttgaaaaatttagcaggaaagtatctgtagttaattttgggttacacaatgtccttcactgtctgggcatagaaaagctagctagctcatctcatccagaaactctgccatgagtttaaaaaccaaagcacatactttgatattcactctgaaccaagataaagctttaggttgacataataaaagatggagttaacattcctaaaaaaaaaaaaacaaaaactatgaagctgtaggatatatttcagtcttattttgcaataaaaatgacctaatgctatctatcaccttctttgcagaacaatacttcttaataaaaggcatagagatatttatccttcaaattaaaaaaaatcatgtaatttttggttctttcacatgtatgctttcagaagagaaaaaacaaatcatgttaaactttacagtatcaaatgtgataaactaaaagcataattaacttgttctcttaacataatatggttgttttgctagatcccagtatactactttttccacaggccacgtttttcctcagtatgcacaaatgaaaaagagattaaagaatttgtgtgacctacaataaggtcagcttctaattattatgctaattccatgtactagatttaatagatctactacttttctaccagttaataaaatagactctaaaacactatctactatctaagaagggtgccctctcataccttaaaatactctgtttgaatagctgtgaaggatagtaaaatgtcttactattctgttattgatcctgaattttaaacagataaatgccaaccagaattaacttatttcatgcagcaacatctcaactctttatgttttatttttgaaagagccatttttctgaaattcccctactagataaataatctgccgaatcaaataactgatctattggcaatcccctcaactgaccaaataggctacaatgagttaatcacgcaaaatgctcaccacttgaagtcagaaatccaaattttgtgctctcttcaaccgactctgcaaagtatttgagcttgtgacttatttgagaaagtaacaatttattaacaacacagcgtataaaatggtaggttttgctgtggttttggaggtcagtttatcaaagtgaggcccttctctaatcatatgcaagaattgaatcaactaaaaaacacatgtttggatggatcatataatttaaaatctggattatgcagtgtagaactgtgaaaaaaaggtgaaaacctgctttctattcttggttcaattaattaagtgtgtgtacctcccaccttttataagcatcttcttaagacaccgttgacattcagtaaacaacacatgttgaaaatatgtaatataaaatatcatagatgatattttatacatctatgaaactgcaaaataatcaaaggtaacaagcatacctatcaccccatacatttttcgagcctctttgtaacctcttgttcccttccaccgattctcctggtaggaggccaacatttatgtgttttctgtcactacagattagtttacaatttctagaatttaagtaattgagataataaagtaagtagacttttttgcctggtttctgtcactcaacataattattttgagattcatctatgatatgcacatcagttgttcattcgctctcattgctcagtagtatttcttgcatgtatatgccatattagtctatgcaagttctggtggtttccagtttttgtcttttacaattaaagctgtcacaaacattcaaaaacaagtcactacagtgaatttttctttcatttctcttaaacaattactggggagtataatggctagattatagggtaggtatatgtttagctttttagagatatatggtaggtataggtttaacttttttgagaacctcacaaattattttccaaataattattttccaaagaagttgtaccatttcacattcccatgaatggtatgtgagagtttcagttcttccacattttcgccaacacttggtaagggcatgacaataaacagagtgtttgcttcatgggaataaatgattgtattgggatgtttatatggctgcttcttactctgaagttccatcattcagaatagattatgcaggtaaaaaaatagtcaacagctttaaataccaattgtaattgttacaatattttagaactactaacccagtattctgggtcaaaccaggtagacagtatacattagttccaagttccagagcataaaataatgatgatgatgatgatgatgatgatgatgatgatgatgatgtgtgtgtgtgtgtgtgtgtgtgtgtggtgaagctcatttaaaaaactttattgattctaggattagagaacacacgcatggcgtggtgagagtatataaaagagaaatccagtgaaaaataactcattttgcttttaagtagctttacttgaatgaaatttgctttattaccatatacttcttcattcttcaaaagcaattgggatgctttactcatttatgaacttgtgcttttattctaaagatttaaaaaatttataaattgaaatataaagaatttacacaatttctttcatttttacagacttagtcaagtaaactgcacttttctttttctgatgatgcatcttaattgcatattatcaacatagtttgctattcagcagggacaatttcataattgctatcttcagagaagtaaaataatagagggcttcttctattaacatttagtaaagtgttacaaatagcacttggtgaatgaagggcttcaaattattagaaggacataatattggttacacatgttcacagaataagaaagatatttttagttcctttcagtatatcaatttctgtgaaataaatagcattctgcaagtaatgatatgttactgggcaagtaaagctatgttgttaatttataatgaccaggatagaatgtaatataaatgggatgagcaaaggaaattcgttggttcactgctgcatcaaatctgaactctgagttttctccttatatccatcctttaatgctcagctcaaaatagatctctaagaaacgttctctattgtttccctattacaaagtatattttccttctttaacatactgtatcccttcttatctttaccacctatatgtttctgtttttacccctggctttatattcctaagtattattgcatctttgtatctattctaactgcattaaaagttcccagagttttggagccatagtctgaagttggttaagccccagtgacaaagtttactagcatctttctcattacttacatttgtataatgctttatgtatttcagaaaattttcacatttgatattgtctatggcataacaaaatgccttaaaccaagtaagaattctatacatcactcatcaatgatggtttctcttgggttgtctttgtgtaataagatgctttttagaaacaatgggagctgtaaagtatttcgaatggtatttcaattctagcagtgtctaatgtctcaacgtctcctttctttttcaacaaagcctccattttactgctttccagggtcacacttgattatccattcagagcctcagtggcattttcacagatcatacactatatgatatgtgggacaataaaataaaatagtgaaataagagtgattatctcaaggtctccttacttaatcagtgttctttttttcaagcttaagggaatggctcaaagagtgaaaaatatagtcaacatgtgaaaaatttttgtttgcttctttacagtctacaagcttattaaatcattactgcaatatattctccagccaaatattggtatccataagttatatgaaaggaataattgcatatcatgcagcaggaagaagaaaatgcattgattatgggatttaagaagaaatactgctctgtaactatctgtacaattggtacaataggttgtgttttgctttaaactggacagttgtgctgtgatatcaatatttcttctcttggagtagcttagtacaaccagcggcaaacagtctcctcaattacttcaatgtgtcattcaaatatcatcattttggcgggcattctgatgtgtaaaagtttggaacgcatggatagcattaacagcatagggattcctcctcctcctggttacagagcatgtgtatcagttttgtgccttagagatacagcattatggaataggaatttcaggtgggaatttcataatcaaaggttatgattatggggtgagagaaatgaaggaggaggtaaatagaggaaaggtcagattcaaacccagatgcattgtgatatacaaaaagcataggctgtttttcagtgtcgaaataaaaatcgctgaggatggtgctggtcaggggatacaggccctccaggtgatgaagtttatgggatttgtgggaactggagagaagaaaatctacgcaggagaaatgggaggggaggagtggtggccatcaggaaattgagtgtagccagctggtctgaagaaagagtttactcaaagaaataacaaacaatgcatttggggatttaagctctgagcatgtagaaggcaaggctcagtcttactttagttcgaccccggtgacaggcatgggacctggaacatggtggagctcagtttattaagtgaggtagcaaaaaacagttgaaaaaactcggcaggattagggagactgagctttatctttttaagtctttgaaaagtcccagagaggttttggagtagaatataatttttcctgaaatactcattgcaatagaaataaatagcaatatcaaaaatacaaacagaaactatctttttgtataacattttaaactttacaagatgcttctataatcactatttattatcctcacttggagatacagcataactattaactaaccactgaactatttattgctaataaagtagacagtatagctaagcaagtttcaaaacaaattattttgggtgacacatatcacttgaataaaatactatataatattctaataatgatttttaaaaggtcctttttattcccatccatcattaaatttgtcataatcacatcccagattataaacaatgtaaattaatatggtaaccctcatatatatgtagagatctgagacaaaaattgtgatttttttacagaaatgcatgttggcttttccacagctactcaaaataaataaataaataaataaaaatagaaataaaaataaaaataaaaaaagataaatccaaaaacaacaacaaaaaaaacggaattaatcagacctcaaatttagaatagtaatctccaaaaaggctactgctagcataattttcaaggctaatccaaaaggagaacacaacatgaaccagtaattccaacacataatttttgttatagacaaaataaattttaggagtagttttatacatgtatagtccatattgtcacactgtattcaattatttttaatcctagctgcatatatttatctagggaaaatatgaatcttaagagcgttgcactatgtatctaatgaataaatacaggtcttttctcactctgctatattcctaaagattagttcaaggtgaaaaagcatcatacatgttccaaaagtttgccataaaatcagtaagaagctgttcacatttatatattaacaaagtaatcatttatcattaaaaaaaaactagtgaaaacttaacaagtgctcttccatatatttaatgctatttatttttattattttgctgagatataggtatggctttctgtttttattgtaacgtaaacaatattaagtataactttcttttaaaaaataattttagatttacagaagagctgcagtgttagtacagacagttaccatgtatgttcttcacccagtttgtcctaatgctaatctgttacattaccataggatagttattaaaagaaactaacatggattcaatattattcaccaaattacagactttatgtggacttcaccagtttttccatgaatcttcttattctgtacctggatccaatttaggatcgtacctcacatttagttgtcctgtctccctaattcccttggtgggagcactaaggaaacactgactcttttaaagagtatagatcagttattttgtagaatgtgctgctgtttaggtttgtctgatattttctcattattagattgaggttatgcatttatttaaagaatattccagaagcagtaagtccttctcagagcatgatgtctggaggtaaatgatattgcttggtgatctttgatcacttggtttagttggtgtccgctgtgttactccactgtaaaagttactatgtatcactttagagttaataaataccattggaaagacactttaagattatgtaaatatcttttctcttcttaaatttttacccactaattttagcatgtatctgtggagcttatctgctttaatggtatcttttttgtaattcaaaatgtgtaacttacataaatctttaaaaacatgacttctacaaagcttgtatctatttattttcttcttctggtttcctgacaatgcaaacaaatgttagagaatttatcttgagaacaacatttcccaagttgctatagaaaccaagtaatgaagaaaagactaataacttttctattctatatagtatataagaaatttaaaaaattattttagtgtttaatctgtttggctattttcacagaaaatacattttttttctgtgttgatagctaaaattcagattttccagtagctgaatatggcaaaattatatgatataattttatatacttcttgatttattttatattatcaatatcatgttcaaatcatttttctgataattataagtgatacatatacattacaccaaatttatttaatattcatccagtcagataaatcaatttttgcttattgcatgcactttttataactaaatatatactattgataggaaatggttggagtgtaatttgtagtataagaaagcatgctggccttgaggaaaagcttttttgtatttaaatgtaatgacacattttaagtacaacagtaaagaattaattattgaagtagagatttgtaaattcagcagtaaattttaaccatcaatatatattttgctattttgttaagctaacataatttaagcttctagtaagtatataatagttgtaactgcacataaaactttagagaacaatggaaattttccatcagtgtttatgatagggacaaacccaaaaagaaaatagaatgagcttattacgatttaaaattacctttctgtatcttctattgtcattacattttatttgatctttattagttttcaacttttaaataaactttttaaatattcaacttggtacctaacctaatgtaaaaactacatgtaaaaatcaatgagaacaaatttatggtgacccataatatttaacgattgctaaattgattctgaaaatatgtaaccataatttgctataataccattaatctctgttgactatttacagcatttcataggaacttaaataatttgattttttacacagcaattcaaaattttcttactggcttcttcattatgtatcatcagctttcagctataccaatgttaaaaaaaaaaagccacaaatcacagttagtccagggaaaatttcttgtgaattgtttttgtttgttttttaaagtggagtgtaattgctaaagttagtctaaaaccatgatttcattcaaatgtggctatgctttattctacagagaaaacttgccttggtcataaaatttatgtggtcaagaggtaacacatgcttgatgagcttgatttgcaattttaagttgtggttaaatccctagggaagcacagaattctttatagaggtcttagaacaacaaggctggaaatagtgttacaatcatccactctgatgttatggtcctccacccccatttcagttttcttatgagtaaaatgtgagtatcaatattttgcttagcaaggtttaaaaaaaagaggctaaatgaagacaaaatgatgttcagttgaatttcccagctctgttatagataaaatattatacacattttatgatacttaaagaaaactgattattttgaaatttattaaatatattttaaatggcaacattcagtgaaacttttccatgaggtccctgcaatgggagatctcttatgaaacattagttattaaatcaaacatgcttttgtgtgcaccactatgcatttataattcaaacatatctttacatttgcaaaacactatattgagatcacatctaatgttattcaaccatcattttgttctagcttactaaactggaaaataaactgtttacttaactggtatttatttaacctgaacatatctgcatatattacaaagcagacaataacagtgggcaatgtgatatttgaaaggagtggagaaaatgaagacggtggcaataattaaaactaaaagtagtttagagaagatgccagctctcagatttgcttatttatctctaaggatatatgtgtaaaaatgtatttctattttagcccaaaaattatctagcacaattttaattacaatttattatgtgagaaattatgatgcctttgatactatttaaaaagacatgtttagatctaattattttttctaccaatactagcaaaaagtgcttatttgctaaattatatatgtatttgaatgaaaataatatgaagccagagtcattaaagttataatttacagcaatgcctacagtacagtatttaaattgcttaattttttcctttcaggtagaaacaaatgtaaaaacccaatgattcccccattctatgcagaatacaagagaaaggtaatcttcagtactgctcataaaagatgtttacatttagcagtgtaggaatcatggctgggtgtgcaagattattaggatgcttcagggtggttgctttattttgttttattttgcaggaaattatgtaaccagcaaacagacagaaaaagtaatttgttgggaatatactagcatatgaaaaaaaggacccattcactaattcatccatctatctagccattcagcactgattaaacactttttatttatcagggtctattttacttagtaggaaaacaatgacatgtaagacatagactaccatcttcaaaagcttccaactacaccatggaatactatgcagccataaaaaaggatgacttcatgtcctttgcagggacacggatgaagctggaaaccatcattctcatcaaactcatcacccgcctgtcagggggtggggtgctgggggaggcatagcataatgagaaatacctaatgtaggtaactggttgatgggtgcagcaaaccaccatggcacgtgtatacctatgtaacaaacctgcacattctgcacatgtaccccagaacttaaagtataataaaaaaaaggaaagtaactcattaaaataatgtgtaataacagccttaggaaaagtgtttacaaggtatcatggcatttacagaagagtatggaactcttggtgatattgcctggaagggtaaagttagaatgaaagaaaagtcattctcgttagataacagagcctaaataagggcataagaaacataagttaaaaacaaactaacaaacaaaaactccaagtagtctggacatcagaagcatggaacagaagtggagcacggacagtagaggaaagcacaaccaatgactcaggcaggcagaaaccaaatcaaggaggccttctctccattcattcttaggccgtggagacctgggagtgatttttagacaggaatagcataatctcattggaagcttacagtattaagtatggaaaatagaaaggaagcaaataggaaacagagaggtgagttgagaggctactgcgatagttcaggtggaaaatggtatgtctaaaacagtagtagtgacatagagaagacgggtgacacctgagagtgtttgggagtagaaagggcagaactttgtgatcacttacacatggagatgagacagtggtaaaagttgaaaatgactcccaggtttttagcttgggtgaataatggtgtagtcaacacagggtgaaaataaaggaagaagaatatgttttggagcaaagataataagtttaattttaaatacatttaatttgaaatgaaaatagactagctatggaagaactaaatgaaaatagcccagtgatatggtttggatgtgtgtcccctccaaatctcaccttgaaatgtgacccctcaatgtaggagatggggcctagtgggaggtgcttgggtcatgagggcagatgatccctcagaaatggcttggtgttgttctctgtggcttaaaaagagcccgacacctcttccctctcgctcctgctctcaccatgtggcacactggctccccctgccttctgccatgagaaaaacctttctgaggcctcaccagaagccaagcagatgctggcatcatgcttcctgtacagcctgctgaagtgtgagccaaataaatctctttactttataaattacccagtctcaggtattgacttacagcaagacagaagagactaagaagcccagaaattctacagactataaatgctatttgtgaatcaatagattttaaattaattggcgatactgcttgcgtctaacgtgctcctcaagtattttgggctgctagtcaataatagaaacatagacagatttcgagaatgacttaattcattgtgttagactacaactgcttggaaagcatagtttaaattcatgctgtatcaggaaatcaactagacttggcttgctgtataaataagcagcacaattaggaagaaagaagcatttgcatttggccagtggagtgatgataaactagaagattccttttgggacaacagtgaaatatgttaaatcaagctattccaatgcaatgtaaacaaacaatatatatcatctcagaaattcaattaaaccatgaatcatcttgtcattaccgttactccagtttactgttaacatggcataaatgtattttaagctgttaaacaggggcatgctattctttgaggaatctgaattttatgaactgtcacaagagcaataataaagatggagagtatcagctaagaatatccataattaacaaatcaatatgttctagttatctgcagtgtggttagctccatcaagagcaagataaaggatcaagaatgagaataaagagtgaattaagcagcttaagatccagtcaaaaagacaaaatattcattaataataaaaaaatcagagtcaagtcctgttgcaatttgactcatgtaaaagttgaactcatgttcaaacgtaacctccaaagttgtaggtgggcctagtggtaggtgtttgggtcatgggggtggatccttcacgaataacttggtgccctcccagagctaatgattttacaggatatcttgttttttaaaagagtctgggacctcacccttctctctcttgctccctctctcaccatgtgacatgctgactcctcattcaccttctgtcatgattgtaagcttcctgaggcctcactagaagcagatgctggcaccatgcttgtataacctatagaaccacgagcaaaataaacctcttttatttataaataacccacccttaggtattcctttatagcaatgcaaacagactaacacaagtcccgaagaagaaggttagatagattagaagacagattagtggttaagaggataggttttagcgtagaatgtctgggattgattttcatttctcctccatactagctatgtgaaattgggatgactacttattctcttggaggctcaattttcttgtctgtacaatgtaatatttgtgtccacttaactagttgttatgaaaatataaaacgataatacatacaaactgcttcaggcagcaccatgcatatgctaaccattcagtaaatgttagctctaatgataacagtaattggtattattattataaaaatcaagaaccaaatcatcagaatatatataagcactaaagagttccaaagaaaggaaaggtcaattggtcctgagctctttgttgaggcttgaaaagccagataagctttctgaagtaaagagaaaataagctattttaagtctctgttacaattcattcattcattcagcattcattcatttattttaaaattacacataaaacattgattaatcatttgatggcaggtgctcaaggccatgaaggtggtaagtgtgaataaaataaaggtttgtttttgagaacagtgagatataaagtatatgggcattcacagataacagggcagagggtagatctaccattgttctcatcctactccttctttgctgccaagtaagtatgaactatataagccacaaaggggcatgacagcttgtgcatatccttcagtctttactcttttgaaacattattgttaaaaatctctgcctttagaaatagtaaattataggcaaagaaaaacacggagagcagccaatttgggacattcccaaagtgttttttgttctagctctgtgaagagtctctggtcagattttaatgagttttcaatggccaacataattgatattctcttccagaatttaactttggcatgtctgtgtgcaggctattgaaagactctgggataagtcagtggtattttaacgtgaggatacaaatttcttaagttggctttcctatttcttgacactgtctaagaaactctactgtatttcaatctcttttgccaactagagggatatttttgttagcactcagtttaaaaagcctaccattttgactaaatttactggcctaattcagttacacagctaatcaatttagttaattcagttggtttgtggacctttcattgaattaattgattttttttttacctcaactggctgagagactagactggacttctgggaatgtattctctaagcacatataaaagacaattgttttgtgttaaaccctagtatgtaggccatgacaattttcattaaagaagtccagatataaaacaaaattgtaaatggatattccctttctcaggtcagtatttggaaaagcaggtttcccacccctccatttccaaacccattcctacttcttcgtgcatgtggagagaaccacaagaggcatattagtgcttcctgcagtacaaatcaccacctacttttaaacgacatctcagaaattattttaaagtatgacaaatagaaacatgtattctagaaatcatatttctaaatattaaattttccttcattaaaaaaattctatcatcttagcattcaaaatatattttttaaaaaatatcaattgggtaagggtctgagatattacaagaataattttcttccatcctcccaatagttagtgacatttatttagaacattccactttcttttctgcccaatgcgtctgattttatcaagtcaccattctaaactaagcactgcatctggtgttttgtttggtaagacagatttgtggggcaagttcaccaacacattatgatcaagcattgtttagattaatataacacgaatacacaaggctgtattacaatttaaattttatttcacatgcaaaaaacttcccctttacagaatttagattaatcccatggtttgttattgactatctttagaaagaatcctattattccaaatgacaactttgtaaaaatgcagtgcagctataatggaaagtacaaaagttatattaagataactcctttctgagtacgtgtatattcattttacatgtttcaactagaatcaactcttacaagtctgccttcagccatctgtatcactgaccagcattggaaaaacctcattttcaatttctcggcaccgttgacatttggacctttaatgactcattaaccctttacagcctccttctccagatcttttcaatcacatatgatcatgtcgccaaactgagatatttttgactgttcgttgctagtgcagataatattctctcctcttccattctcccagctcagtgccagactggactgtatatgtatgagatgaggatgataaatgggagaggagagagaaagccaggcaagaggtgggggagtagagcaagatgattgagcagagcaaattagaacccataagttatattttactggttttagaccctaaagagatagagcttagaatgactcaaaagggaatttatgagactatggactgcacagtgaagcattagaaattctagggacagatgtacggtcagagttgggaaggaaggaattgtctacttgttacaaggtgcagtgccactctagagaccacagattggtagctcttggggcatgtacaggcacatgcttaacatggatcgggctacattgagattttcttcttggaagaagaagatgttactgtcagaagagtatgtggaaaagtagattcccaaggagaagattagtaatggggtagatactaaacaatgagatagataccaagtagggactccaggtgatgggataggttttgagcatggggagacatccctctggaaggattcttggagtatgggacaaaggctgaggtcctcccttattttgatgggcacaatcaagccagcagacaaacaggctactcagaatcaaagaagaacaccaagaagtaatgttgtctgtctttagcaaggagcaaggaagagagcataggcaaagaaaaatatctgaaaatgttttagctctcccagaatcaagattttagtgtggtttcattgcttccaaaaattacaaactttccaaacacactagagtaaagctcacacaccacatattaaaatcaatgagagatgatctgtgattactcactattgacatggatcattgatgacagtaagaccctgcaaaataaattcccttactggacttacaaaaacctcacaaaaatataaaagtaaataaaattatctttattctattaataaagaaaatgtatatgaagaaaatgcactttacaaagtataagtaatttgccctgaatgacatggttactgttagaaccatgacttggattcttaaaggtttaatatcctgtcctatatgctatgctacctctaaacatcacctcaagaattcagtagaggccaggtgcagtggctcacacctgtaatcccagcactttgggaggccaagatgggcagatcacttgagcccaggagttccagaccagcctgggaaacatggcaaaacctcgtctctacaaaaatacaaaaattagctgggcatagtggtgtgcgcctgtagtcctagcttggtgggggttggggtggggggatgtgctaaggtgggaggattgtttgagcctaggaggttgagcctgcagtgagctgtgattgcacctctgcactctagcctgggcaacagagcaaagaccctgtctcaaaaattgaatttaggaaaaacaacattacatctattactttttttaaatatacagatcactcactgaatatataattataatatatctgatgcctgtatgaattaacctaagtaaaaaataacactgtttcttctgaatttattttgatttttctttgaatcgaatttattacccaagccactctcaagcatcctacagagacctatgaaggatgagttcttatgtgacttagctttaaaattaaaaaagaaaaaagattttaaaatagcaagcaagcttttgcttttcttaagaagtcaagaaaatggactatagatataggtaaaatacagttaaagagcaacattgttataatgttgatacaaagtcaaacatatgaataaaaaaaatgtcaatcaactggatcctttcaaatatctccccaaacacctggaagatgacaaattttttagattgataacctttataatgtaaccaagaatattacacagcctttgtgagatagaaattgttttaatataggatagaaatgagcagatatcacaatggtttgccacaagtaaacgaatttccttctttggataactttaagtaaagctaagttcaagtgaaaaaaaaaaaagctaagcatgcagtggaaaaaaaggataatctgtttggattcaaggttatgctattcaattctcaaatcactgagcagcatttacagtaaaatgacactctcatttatctcccaggcaagcattgagacctgccttaagatgcaggaggttagtagacttcatagcacttaattttctaacactacaataataatagttaacttagtaaaaaaaaaattctgtgtcttcacataaagtgaatcaaaatatatctttgcatcactgcctactgtaacctcaaggaacttattcatctaccaacagccaagacattaaaaaacagagaagttggtctctcaggatagataccctattcacttaaggtggggcagataatgcacagactctaatgttggatctgtacactattggccccaccttaggtgaattaaaccaacaacatcaacagggaaaaatgtgcaaaaactgtgttgttctcactttatcagtctttccaatgtttaagaagcacagattatttgctcagaagactagaccaactggaaattgaatgatcttgatctcttttaagaaaaaaccatttgatctaaatcttcaaataaacaaaataatttgcaatctgtgtcttatgcttctattttgggagtcagaccaggcatgagctgagtagcccattctgtcttggaggacaggagcaaaagggactgaaatataaagtcacatgtgggcattaaagaacatcctggagtcccaggccatataaaagggcttgtaattagtattttagtaaatactaatgagaatgcatgtatcaacccacattagtaaatattaatctgaagtaatattctaggactatttattaattactttcaactcttcccccaaggtctagtaacccacaaaaagcttgaggaagaaaggaaatagaagctttgctttgttgaactatttgatactaataaatatactgggcagccatgccatttttataactaatcaaagcaagtggtttgatgttaaatcaataatgtttatacaaatttgacttattagatacagtgatagttacctcatggctggaaatcagcatagtaattaaaattgtgttctgatatttattagttctatgatctttggcatggcacttatctttctaagcctcatgctgtctcatctataaaacagaaactgataacaaaatccacctatcaaggattctgaggctcaaatgagatggtacagaaaacataaatgtgcctggcacagggtgacagccaataaatggcagctgttggccattaaagacaaggcccattaatttgtaagttagtgcctactacaaagagcatagattagaattcacacctggattaattaattttcatcttctatgtcctaaaactcattcctccttgcaaactgggtgagactatgtagatgccccagcaaattacccagacggaagatgatgagcaagtagcatctctttacttaaaaagaatcatattttctttccaagaaaatcttcataaaccttagcccatttacataaccaagccatctctcaattggtcttgtttgagtttactatcccatgtcttcttacttttttaaaagaggtaagaataggctttgaacacagaatctggtaatagtctcaaaattatggtgctaaatttccttggcttatcaacattaaataagggaaaggaaaatctactaggagcatcgtgacttggttgacacacatatgagcacgaaaggtagggtaatatttttaactatatttagcgatgttatagcttggggtcagttcagaagcagaaagggtaaaaacaaagcgagtaatggtgacatgcaatattgtcctcattatcagaagataaaaccatcatactctaatgggctgatacagattgcaatttttagtagctgatatttccaagggcctagcaagacagagtgcaacagtacgtgtcacattctaaagtctaggagggaaaccaaagtgatctcagtaacataggaaaaattttaaagatatagcttatatatacattctttagtggactcaatagctgtattaattatgagacatggggggaattatctcaatacagccttgcacataacacatttgtatgcaagttttacacatacatctatacctatatatgcatataggtctatacacaaatattctgtaactacacatatacttgttcattaatcaaccattgagggcctacaaagtacagtgagtgaaaatatatagaggaagcaacactgagctgctgtggacacagaccatacttatcttgaaggtctctatcctgcaatcctaacttcccagagcagactactaatatattacaaagtaatctactttgtaatctgttagttttattgctgacggtattttaattttctgctatttggcatgacgaaccacagaggatcagaggcaaactgttgctctcgcatggaagtggctcctatatgaagacacagtgatgatgacaagaagcaattgctctcttaataagggagaaggatttaaaatattagttacaggccaggcgcagtggcttaagcctgtaattccagcactttgggaggccgaggtgggcggatcacgaggtcaggagatcgagaccatcctggctaacacggtcaaaccccgtctctactaaaaatacaaaaaattagccgggcacagtggcgggctcctgtagtcctagctactcaggaggctgagacaggataatggtgtgaacccgggaggcagactgtgcagtgaaccaagatcaagccactgcactccagcctgggtgacagagcaagactccgtctcaaaaaaaaaaaaaaaatatatatatatatatatatgttataaatggtagatctaggaacttagaaagtacagtagtttagtgtgagggcaaacagctttacatacttcagctgccccaaaggactgactgtattacagcacagtacagtgactgatgttcacaatgatggctttgggttatcaaaaagaagttaactcacgttagcaagttcaatttaacaaggtacgatgtgtgtattattttcaaaatggtaaaaggagcaagaaaagttttcttgcataaaacagaaggcattagttatatggaatgctcacttctgtaaatacatcttccctaatggtatgagatagttagtatacatacccatccatccatctatgcatttcatctttggcaattttctgttcttttagttaagataggttaccgactactcctaccactgcaaatatcaccaaactacaatacagtatactaattactaaactagattaacactgatggctaactttattatttataattgtaatttcagatttcatatgaatgataaagaattctgtaaaattacattattaacatcttagagccaggtggctcatgcctgtaatcccagaagtttgggaggccaagtcagaggcaggtggattgcttgagtctaggagttccagacaagcctggacaacaagttgaaaccccgtcactacaaaaaaatacaaaaatagccgggcatggtggtgtatgcctgtagtcccagctactaggaggctaaggtgggaagatctcttgagtccaggaggtcaaaactgcagtaagctgtgatggtgtcactacactgcagcctgggtgacagagcaagatcctgtctcaaaaaatggaaaatacaataaatttaaaaaataaaatttgagaaaaattgaatgaagaaatatgtaataatgggtggtggtatctgtcttactgcaggtaagttgttcctcaactaactctttctgcctcgaaggtggccataaattgacacatactgataatcgctaagcaactgcatggattatttaatacccgtcaattgtagattatgacaaacataaagagatagtctttgccaaggtccccagtttagattgttaaggtaaaaccctgaaatcttactttccctttcaagtttcctatactttattttagataaagctaaattgacatgtttagttttcataaaattgtaagtttctttgcttacatattactaatacttgaagagtactgggaatatcatcctgtccttgttaacaaaagtgaacagaacatgaaccagagaatttgaacttggagatctagatgatagctacatcattaagaaataaaagtagtcaaatggaatattcagttgtttttcataatatgactttccaaacattattataaattcaattttggcttgtttctctcctaaagaggcatgagccagtttatatactaaaactacacatctcacttaaacaaaattattatttttattattatttcaattaactttctttcatcctaacttctaagatgctattttggttgttctctttgatccgcctgtttttcttttgctctgtaattgccatcacatagcaagatctagcccttagccttctacagtctctctaaaaattaagcatatcactaggtggatttaaagccaacacactcaggaatattcagtagttttgcatgtcactagtttcctgatctgaccttactgccatatcatctggatatcccacccttttcaaatgtaagacccaaattacaactattttttctcccacaaactagtttattgacatcaccattatctccattgctaaggcttgaaaacgagtcatctgtttctttccagtctttattttcatttggattcatcacttttttctttggaatctataatttctatccctttacctctcttctcaatatcctccaatgagtataggatcccttaagttcaggcacaaataacttcagcagtctctagtctcttctctcctcaaatccattttacaattaatttgtctaattttgtttcatcctgtcagtatcgtattgaaaatactaactgaataacttgtaccatgttcttattttgaacctaaaaggtgatgcatcatctttgcatcatcaaaccccaatgtctcatttgcacctggaaaatcatagcaaactggttttaatgtccctgtttccaatatcatcagagcctgcatacttgttgtagtttactttttttcctacactcaagtttaaccgcatcaaaaatatagatcttgcttctaaaggtaatcttgaaactagacaggctttctctaaagtataatttcaggggcttggagctacttacttcctctccctcctgaactgattctctttctgctgtctatggtgccacaactagaaatacatttctccaggtttaaagctgaaccctcataactttccaagtagccttctagcaaaaaacaaacaaagaaacaaacaaacaaaaaactagagttttcttttttttaatatatttaagttggcttttagaaactggatggcagagtgttttatttggcaaacatagtacatttttaaaaatgaagttattatccacatttacacgttaggtttcaaacaaaaacttagatttccagtttctcataaaaaacagttgacgttgcaaccagaaattgcagcaaattcctctcacactcctgagtctttctaaaaggggctactttggagggaaataataatattttagacagttgaaagggaactatgtcactagatacaagaccatgtcagcctctcttaggagaaaatcacctttcttgtttcaggccttctgcccatctgcaaaaacactactgcttgtcttctttaataaatggaagcaatttaaagaaaacaatctataaaatgctacataagaccacattaaaactacaagtaaaaattgacatccaacaaaaccctgctttcaaatacaatttcttagaaagaaccttgattctgctgtatccaccacatctcgagtctatctccagggaaagtacaatagcgttaaaggtaacgggtagagactgttgccaagtcaatgaagcaaagactttctctctagatgcatggaaatgcacggtgatgggttgattaggtcaaggcatcttttgtattatgcatgtaaatgggaattaatgtcctcagagtgccagtagctattttgttgaatttggtaaaaatgaaaccctgtgtttaagcttcaattctctaaagtttatgttgggaggaagatgcaaaactctttatacttccataattaggtattcctttgctgacttatcaattgcctcaacttaggactcaaagtgcttagcgtcaaattgaaagagaacacatcttttattagaattgcttttggtttgtttcctctgataacaaggtaatatctgcaaaccagtgaatattgacactatttacaaccaaattataggaaaaagtcagtagggtatttaaagatgggattagtaatacctcatttacctaggcatttcctgggaaggagcaattctggataactgaattttctctgtacctgaagcttatgcccatttaaacctaaatattagatagaaatcttcataaaatatattaactgctacattcctgtcttcctacatagatacttctaaacataatactatcttttttttctcctgatgattcaggggtcatctctgtgagcattcattactgtaccatgtggttatatatttctatgcatgctttatcatttttttctctcctccctcaacgtcaggctttcagctgtcactttggctgtcactgtgtctcttctcagcttcccctttgctgtttctaatctgtcgtgggctgggaaaccagataaccaagtttattaagaatgacatgctgaataaaagtcagtaagactcagagtgggcactaagaaataaaatgcatgactttaatgtgcagtttttgtgaaaactattttgaatatgcagaggctttttaaatttaattttagattgggcaaccgcgttagggttgaggttgttgtgagaatttgtagaatatgtccccattcagtttcaaagtatttctctgcaggagaccaaggcagttttgacaaacacgggcaagagaagctaagttttccctttggaagcagaggaatctggtagggaaacactcaaggacactcatgtgaggctttaggcaactgtggagatcaaactcttctctctgatcaccagatatcctcttcttcatatcgagatggagggcattgcctgaaagaacgaaaatttagcactaataggtaaaatgtatggattcctgttagaatctctcagaattttaccttctcctttatagtagaatgttggctaggtgagatagaggtaatctgggaagggaaaagtccagaagtcactgtttttcccatgtattaatctacccacttcacttccatctctttctggacaatgcacaaatcagaaccctaacccaacgtttcttttcctgagactaatgctgtccctgaggatagtctatggggtccccaagtgcttgtggcatcctgggcctccccatatcaatacatcaccaccacctgttgttaaaacataggctcatgtattcacttgcttttattcgaatgacttaatcttcatggcctagcaacaaatagaaccctccctacagagccctccttatataccttattattgcatactcactctttttatgtcctctctcagtgcttctctcagtgctcattttaaaagaatttcacctctctaaaacagagtggtgcaggactgggtgggtagaagaaattgatttgttttgcctgcccctgtagccacagaatccagttacagccaggtttttgctgcaatcagtaaggatttctcatgttctaacaaagatgaaagcaataggagatagcatccgttatcttctcagggactttcttttcagtatgacaatgggcattttttgttgttgtttttgtttaaagccaacttacatgctgtacagcaagggcctccatcttccaaacactctaaagagtaaaattagtctgaaatccagtagaagaatactgattataccatcagtccaaaatcttcagggccaccagaaagtgccatgggcttgcggctgctaatcacttagtttggtgctttctaacaaggtgttgtctttcaggttttttgttgcatcacactaagctatgcttgcttcctccgaacacatttaagtggattctttttccaatctggagacttataaaaataaatatacatacccctttactactaatagtagggttttctgcaattggatctaagttctgggagcatgagtcaggggaatcaatttattctattttaggatatgcattgagatccacctcaaaaccttttaaatcaagattcaattaaatttaatatatgtaagtttgttatattaaaaaaacaaattgaaacaaaatatcactggagagacacaagaaaactgtacagtcctgtggtccttattttatctcttctttcagaaatgttggaagccaaactaaaattacaggcttgaaaagaaaaccagttttagaattccatcgccctcaaagatttcaacaatcaaaacaaaaccagttttataattccatcaccctcaaagatttcaattatcaccactacaaatcaatataggtaatcacttgcatacaccaagacaattttactctaaatgccatgtctatatacataactggactccatcctttaaattctctgtataaaaagacccagctcaaagttacattctctttgaagctatctggatttcccagatagaagtctttggtctatatttttaatctaagtttagcatggttgcttggtcttgcactgtcatgtgttgtaccacatgatcactcaataagctttaggtagcaaaagagggagttctttccatctctgtgttctccaaaagtgtctagaagatagtccaatgtaggaaacaaattatatttaagactgtcatacactgctttgtctaaaaaaggagttattttgaaatgagaaaacaaaagctaacaacttccaactttataagcccatttgaggcttcccatcagcttgtttttttttgcttatttgtgtgtgtgtgtgtgtgtgtgtgtgtgtgtgtgtgtgtgtgtgtgtttgagacggagtctcgctcttgtcacccaggctgcagtgcaatggtgcgatctcggctcactgcaacctctgcctctggggctcaagcaattctcttacctcagccctgggagtaggtgggattacaggtgcccgccactatgcttggctaatttttgtatttttagtagagagaaagtttcatcatgttagcaaggctggtctagacctcttgacatcaggtgatccgcctgccttagcttgtattttgaataacaactctaaacagaatgccgtgatgtcaacatttcattttcacatcaaattttaattcaaacccaactttccaacctgtaaaatttgctggtaggctggccaataatatgtacataacctgaaatgcaaaatatgatgaaaagcatagtgttataaaatagaatattccagacattcataaatatggatttgatggcccatactatgaatgattcagcacgcagacctttgaaattgtgatagtcctctttatgtacagaatgaaaaccatccagaggcaacaaaatgtcgaattctctaatccatcatatcatgaagccatcacagccttgcacatgagatttggttggtgggaatagaaaaacatttgcaagtctctggatttctctggctctttactcagagatgtcacatgcatccatgggtttgagaataagtgtaattgaagtgaactgcaatgtgtctctaataagtggctttgagaacatatatttgtgtaggcatatagtacatatctgtactgaagcactcttatcctaagtgtcatcttgtagcacagacctgatcaaactccgggattcaaaatgataatttatttggtataaatgacacaagccaaagaagataaaatatgttaagtacttctcttgattttctcttctccaaacacacacagatattaaataaaccactcccctcccggttcttttcctttaaccatgagaatcactgacccactgtgctctcagtattatccatgtgaaatatctgccccctcatcgggtacaacagattaaatgatgattaagctgagtgttaaatttaggatgttgtttcacaaaacctccctaccttgtagtgacatttttttctaaagacattttcttgtaatactccaaaagttaatgactgaattttagatggaggcatgacgtgaatctcaaatgaccataatttctttataggcaaattatatacagagttttcaaagacgtgaagagagttatgcatcgttgattttataccctaagtgatgattagaagtaaaatttcttagcttaaaagtaaacagaaaaataaaggaggtatctgacatggggaaagaaaatctcaggaacatagaactgggcttgcatactgtatagtacttgaaaaaccgttaagtggaaatgtatgatctcagaatagtgtttttaggcttaactctctgcgataacaggttcagactgacctggtatctcataagacattttgatagcaattcaaataaatgagattttttaaacattgaagttaaagaaatttttaaaactcttcaaatgcttatttttttaggaaggataaaatggtcttattttcatctgtggaaacaatacacatgagcagctttattctgaaatgccattgcaaagatttgtaatgcttttctattgttttacgatcagagttgctgcttttgcagtgcagaacaatgctgcattatatagaatcggcagattgaaccaagaaaacaaaagggagcactgggcaaccatccgttccttttaggactcttgccctcgccacatatcaccagatctctttagttagtcagtcttcttgtggccataacaaccccgagggctgactcggggatgcttccatagaaaatctctcattcactttctctctctgaactaaaactgtagcccaacagctcccattccctattctaagatgaatactaagactcatctgtgaagtcctttcaaatatacacaatttagcttatacgtatatacattaaagccaactccatggtagttatattcatctgaaaatcctttagtttatatcctgcactgattcaggctgtcttggggagatacgtctgtgtgtgaaaacaaaaaaatggcaaatgaattgacttgaggttataaacaaagatccgattctatctaatccttgctaatttcccctccttcttttattttccaagtaagcctagttaacaaagaaattttacagaaaaaaaaatgccttggtaaatattatctgaataatcctctataagaaaagcaggctctatttcataaatggaataaaatgcctttgaatatgattagagattgcatcattatgtcatcctgttttgagcatcattccttttttattttctagtggtttctattttattgttactttgtgataacacactaacatgctatgtgttgtatgttagcagtaatattatgtgcttgtttttagattgttctggatttatcttttcaaggtcaaaacatttcagtctgcttaagaagctactctgtggagatttttttttcataacttctatttctttttaattcccagacatgtttaaaattctaatcagagtgtgaaagccacattcaaatatgatataacacagagaatcaaaatcaatcatctaccacaactttatccctattttatgatccatcaacaaaaagctatttttgtaatctcgttagatttgccagcaataatgacctaagattaaaaattggggagggcttttttttcattttctctttttccccttgggtagtatgattcactctgtgggtactgcacttaaacaagtattcacaccccctctgatctgttcttgtcagctttttcatgttagtacaacaggaaagcaccccatcaatcattgtttcttcatctatcagtcaaaatgttcattttgtgactattggtcctgcatcccaatctgtgacaatctatgagtgtatatttaatttaaaaagagcaatgtgggaagacacaacactttaagtgaagtttgtaaatgagaagagctaaattatcagttactgtgtcaatgttattgatgggtggactagaaaaatacctactggatgcaaagtcgagaaacttactgtaagccctaccccagtcccctaaacccattttgctgctgaatgctgacacttgaatagtttctgataggccaaggtttttcgtatcacaaggagaaagtagatttaaaaggcaaaaatccaaaggagagaatacaaaaggaaaaatatagatcctgtgggcagattttggtagagtaattaacagaaacagagtgcttaatgccaatatgctaaatactaaatgctaaccgaataactataggaggtagactgaggtgccaagattggagactggtgtggtaaaggccagctccacttgacagtaagagtcggatgttaaacaacttgccatagctgcctcctgacttcttggaggtgtttttttagaatataactgtggtcctttggtccactatacctagggacttttggacttcctcctgcctacaattgcgtgcaaaggtcaaataaactggcaaggaacaaaatgtgagaccacaaatgcaaaaatggcacaactgcactactgaaataaatacgttgaatcaatgaactctgatatttctgcattaaaatgcagcttgcaaccactaactgcaaaggaaaatatgaagggaaaataaagagatggtaactaggacctaatatctatattactaactcaacttcagaaagttggtatattttcaaaattgcagatatgtctgcaacctaaagtatacttcatagcatttaattaattaattaattttgaagtttattttagaggcagaatctcactctgttgtccaggctgaagtgcagtggtgcaaccgtagcttattgcagcctgaaactcctggcatcatgtcccccttttacctcagcctcctgagtatctggaactataggtatccactaccatggtcggctaattgtttttattttttgtagaaatagggtcttcctatgctgtccaggatggtctcaaactcccggcctcaagggattctcttgccttggcctgccaaagcactgggattataagtgtgagctaccacgtccagcccatagcattttattttgaggtttagggactaacgtgtgtatgatttagcaagtgatgtttaatggcattttaaaataatgggtaccaaatagaaacgtatgaattgttacttgaatataattaaactttgtaaattaatggattagactagaaagaaaagattccagaaatttgaggggaaaaggtaggttctagcactgtctcttacatttacatattctgtctgtttgggcatgttattttatctttttgcatcggtttccctcttaatgtatgggtgaatatataatagttggaattaaaccataaatcagtcaacttctaagctgtatactataaaaaacatttgatgtaaataataaaactccttggaatctgtccctctttgtgtctccataaccttctatatttgttagttgaaataattatttctaagtctgaggattgtccattcaaggttgaacactcaagaaaactgatttatctctgttcatctctacaaagtcagaatcgaagaagcatcatatcctttggttaaattcaaggtagggaaaagaaaatcaaaccaattctaccaaagaacaaatcaattgatttgattatgagtaggtggaggttacattctttatcttactgaatttgaggtaaaatcggttaatccttttatccccaatattcatatttaatccagaaaatgctctctggaacaaaagtaatcattacaaaataaaggctttattctacattttagcaatagtctttccttggcttataaaaaattaattgcggggtattctcttgattgggtactttagatcctggtgactgttctaactgatggggctgaaagacagttcccttatctcatagccaaatcacctccatgcaaattgatctgggagtgcctttagaataaacacagctggattctctgcagccatttatgggtccagtttcctaggcttaattttgatttataactactgaaattaaattagccatcttcactgcttaagggtggctttgatttcaccagtgcagtagggagactatttaccaacatattttatcagtaacatttcaacctgggtaagggggtggcggtggggggaaggcatcttatctttggtatttgtacttgagattccttcagaatattttaattgtattatttaccgacaaatgtgaggattagattgtcaaatcagactcacatgaattaaagatcttgcccagcatcaagctttgctaaataatttcaaggatataagctatcaagttcagataaggtgcatcatataacataaagtggtgtaccttatgtcatatgctccaggtagccctgcctcatagatcctgggttctattaactatgggtaatcccttagccagagacatcttgctagggacagagatatagtctcttattcatagtaagtaacattagtctatttccatttgacaaagagattagactaagtctttgctttcctctaggagcacaaattattgtacaaaacgagaaacaaaatttgagagattaaaatatgtgaaatatgttaatagttctaagaaggcttttatctagaacacggtaataaatgtcgacgtgctatagtaggaagagttgaagataaatggttagatatcgctttttatccatatgactttgtgcattagttttttgagcctcagttttactaatattccaaaggattagggaaataagcctaaccagagtgactctgatttttttttttttttttttgagatggagcttcgctctttcactcaggctggagtgcagtggcacaatcttggctcactgcaacctctgccctccagcttcaagcgattcttctgtctcagcctcccaagcagctgggattacaggcgcccaccaccatgcttggctaatttttgtatttttagcagagatggggtttcaccatgttgggcaggctggtcttgaactcctgacctcaggtgatccatccgcctcagcctccgaaagtgctaggattacaggcaagagccaccacacccagtcgactatggaaattttaaaagacagtacatatacgtgtgtgtgtgtgtgtgtgtgtgtgtgtgtgtgtgtgtatgtatacacatatgctatatacacacacacacacacgtatatcacagaactgaagaccataaaatgttctatacatatgaaaaaatgagaatttgaaatgtacataattcttcacacagatagctgacagtgttataaatctcctttcttataaataagaaaaacagtctcagaagtaagtaatattctgatggagagttagaaaagaaaacctgtcttacaactctttaaacatgcttctcctctaagctaaatcatagtttgctaaagaaggtcgtgataaggtagaagaaagacaagaaaagccaaggcaatggggtgaagcaggcggagaaaactgtttatgcctcttcttccaatgtctatttattttctttgtggttctgagcaactatttcttcttttatcttgcaactgtcaaagcagctctctgtagagaaaccagcaagcacacccattaaaaccaaagcatgaattttcgggtgaggatcagtgaggctctcttaagaatacctgaattttcacagagataaacatatttatttgatttaaatggtagaaagtgttaattactaagtttcatatactaccaggagtcatagagaagtcattttggagaccaagagtatattcctagaccatgtaatcacatcatttgagtagctgcttactgagtttattcacaatgaaagcctgatacataaattctttaaacagaaaccagtggcattgttaatttccacttttgtttccaaattgttgcttttgtctcattgagagcatattacttacttcaagcaccttaacaaacaaagctgggtcatacacaaacgtcctactgtaccagcaataagacaatatgaataccctgcaacctctcaacaaccagaagacaaagatgtatttggaaggggcagatgggaagtgaaaaagagaaataaaatatactttacagggaatattttgcacacgtaattctgagtgttatatttttagcttgtataaataaacttcattagtcttcattttgaatatacaggaaaagtttttttagaaaagactcattgtcacaagctgataaggtaagttaggacagtatatgattaatatgctacaatgatgtctaagagagaggatgctcattaaatttgtgtgtgacaaaagttggaaagagtgttaagaccttgaaatactggagcatctttcaaagtgaaacttgacaagttagagaaatggtcagatagagaaatggattttaatcagactgaaaggaaaattaatgtattggttttgtcagttgtaccttcatcttgaacgtaatgactgcctgttacttcctctgtggtttcatccgaacctaacgcgacactcccctgaaaggtctcctctctcccttccttgctcttctgtagcccatgcttcacttctcaactatggtgatgttttgaagatgtgaattagattacatcattcttttcttcaaatcctcaaataatatttagaatataattcaaatcctgggttgccatggtctacaaggcctcaaataaaataggttctgcccacatctttgtttcattttctttcttttctctgcctccaggttggcacttttgttcctttaactcttcaatttaccttggtgctttgtaccagctgttcccccaaagtagacagctctccatagctcttcacacggctgcacttcctgctactctcacttaaagtcactgccttgagccaatttcgttaatctggctctaaataacaacacaaccccatctacactacagttcatcctaataccagtctaattttcttcataacacctatcattatctgaaatcatcttagttgtttcactttagaatcctccttctctcatgagaaagtaaacattgtgcgggcagggtcatggtcttgtttgtcctgtacttcccacccgtacagcagtgctggcacttagtaggtgctcagtagatattcgttgacagtataagacagaagtcctcaaatgttgtccaaggacatttggtagtccctgagactttcgggagggccaagggccaaaatctttttcatcatctcacaaatatacaacggtgctgtctagaggccaaaggatatatgctatcacaaaagattgcctgcagaagtagttgtgagaatctagctctcttaagccaaacatcaaagagattgtcaataatgtaaaataagtcactcttctcacaaaattatcttagtgttggaatataattatttttcataaaagtacacaatttattttaacatgcaacatgcaatgtggtggctattttaaaatgaattaataaatatataaatgttttctcagtcaattctcaatagagtaaacactaatacatatacataacctatacaacaaacataaacttctcagaggttttcaatacatttaaaaagtaaaaagggatcttgaatccaaaaatgtgaaaaccactgaaacagaatctcatcaactagtctccattattccctagaaaacatccagtagaactttcttctccagttaaaattgccctcaaagaaggttttctctttcctgatatccatgcttttgctattcattgtttatgaaatgtctgtctgtttctctctttctcatttctccatgtttgaagtacactttaaagctgtccaaagtagtcttttccatgaaatttgactcatagctctaccacaaaaagttctctctatatatacctttagagcattaagaacctatactaccaattgacaatagtattgttaattatcttctcaaagtgcctgtaaatctctctaaaggcagaaacctctctaaagacagagactgtcagacagtcatggtgcagcctgtatgtaccatgcaggaaacacaaaatgatagcaggatctagcctccaacaaactcttttctcttaaaacctagtatgggatgataaagattaaatggaaacaaaagcattggttagctatccacccaaaaattaatattctggcaatattcacaccttataacttttgggattcaccacccaaggtagacagaatcctcaccaccaccagcaaagaagtccaaatcctaatttccagatcctgtgaatatgtccttaagacgtaattaatgttatagatctagaaacagaggaatgatccaggattatctgagtggatcaactcattgcatgagttcttcaaagcaggagctttgtttggagcaggagagaagtggcagaaggggaagtcagagacatctgaagcatgagagggacttcacttcccactgcttgaagacagaggaaggggcacctggaaagcatgaaatggaatgagggcagcctccaaccaaaatccaggccccctgctgacagccaacaaggaaactggaccttaggcccacaaccagaagggagtgaatttagtcaaaaaacccgaatggcttgaagcagacttagcctcagaacttccagaaaggaacatggccctgccaacaccttgcctttggcccaagcagaggacctaccctagacacatgatactcagacttctgacctacagaagtgtgaaataataaatgtagtctgttataagccattgttggctatttttacagcaaccataggaaagtaataaagcactcatggcatgttcaattccaatagcccttgcagcagacacacaaaaccaccaacttcctctaagctccaagtactgcactctgtccactcaccctgctgccttctttaacttacaaattatgcacacagtaggtatgtttgcataattaaaagataagtagaagaactaatagtctttaaaaaaaattgttcctttagttgttctgaatatatgtttgtcctttgataaaggactctttgcaaggtttccgtatgacactttattcttaaaatttttgagcagttaatttaaaagtgaatccaaatggatatccaaatctaaagtcatctaaactgttagtagtgtcaaatgagattgctccaccacaagctccatttggaaaagtaaccagcacctgacctacagctgagttccatgtaatttagttgtcaaagtgatggagcacaactcttccatttaatttctatgacatctgtatcaacttgactgtatcctttgctgggccaatggcaatttttctggacaagatatggtgtaaatggcagggccaaaacacaggagaaaaaaaatgtaggtgaaattttaaaaataagataaaagatcacatgtttcctaggcatccaaaatttaaaccatctatttgatgatattaaactcaaagttgctgtgaccttattgtattagtaataatagcaccaaggtaacaagtccttggaatctttctatagcatagactattaactaggctctaataaaataccctattttgttcccactgcatgtcacttttgtagggcatatcttggagttaagaaataaagattgaccatatttattgatttgctcattctctttagagaaaaatgtgaggataagttttttatttgatacctagaccaatagatttccaaagagctgggatcaagatttttttttttttttgagacgcccggctaatttttgtatttttagtagagacggggtttcaccgtgttagccaggatggtctcagtctcctgacctcgtgatctgcccgcctcggcctccgaaagtgctgggattacaggcgtgagcaactgcgcccggccagggatcaagatttttaaaatctcttaaattgtccgaagggtgcttcttccactacatcatagacagaaataaaatttagttctagttagacaccctgctctttgaaattaaaaaataactacattaaagtaggcctttccttccactgataaaatgttccaaagttatttatcacaccttgtctattacatttttgaacagataatatttctactatctaattttttaaagcataaaaatatacagagaaaagtttcaatctcatcatctctgtctcttatctgtccagttacctgcactcccacaaacccgtctaaaacaactattgtcattattattattatattgactcttccagagttgcttttggcatatacaaacagtattattattactgtattttatctcacacttttggtaacatactttacagacaattcttttcacagaaggctagcaagtcttacggccatttgacagattaaagcatcaaggctcaggaaaattaaaccttttgcctacatatatactgacacttgagagtcttgcatttttctgaatggtattctatttctatcataccttattacctctgttagcacatgattacctaccatcatttattattctctgtcagcgtcctgcatataaatccccatcacaagggactgaaaggatcttagaattcatttaatcttctactcattcagtatttgcatcacatggtaactcccattcctcttcaatgcttggatacctccagtaagttgtaagccctttaaggatgggagacattttctgctattgttttccctctgttataatttatcatctactcttttctctcttctatcaggataattataatggcataatcccttttatgtgacttcccagtcacagttagttttttactataagaataatttgtaaccagtccctcataggatctcagtgcttgtccattgttgctttttcgtatatttgataaatattcaatttagaataatcattggtaataacttctgtatctttacaaactaatgactgaaaataatcattataatgtaagactcctttaattgggtttccaaaaagattgtttcataggaaataagacctacaggtattcgaaggaaaaaataaaagcattacatggtcaggtaagtaggattattagatattcttagaaattcaccgtgtccattattatgtacaaagctcagagaagtggatataactttgtttaaaccagagttttctaaacatattttcacattgaactccttttccagataacatagatgagcatcctacaggccattttcatgaaccatactatggggaaaaacgttgcaaaagaccatttgtttttaaaaatgttgtaatgaaaaaaaaaaacaaaacaaaacctcatttgtattcagcatatgtaaaacacagaagagaaagcatatctgaaagaatgacaaatagctcagttctcttttccaagcttcacaaagctacatagttcatcttctcaatataactcaaagaagaacagagaaaattttctgtatgcacataaatgtattcatagcatttttttgaatttataatgccttggccgccacatctcagactgaagaattaaaaacaacagtatttcatacttttcttgatttttttaaacttctcttagccaaagaaatcatacattgctgtacttacattgtatgattatttgttattttagataactcctcagataaattcactaaattaaaacactgtatcgaatatgttttgcttttttgtctggacagtctttttattgcaacatataatgtaaaaagtaatatttattcattgtcactgttataattatttctctgattttaaaaacagtaacagacaagttttttttcccccaggattctccattatatctaactgaattcccctatcaggatgccctttttgttttgttctgcttccccctttataataggatataaacaagagacagaagttaaatctccagtgagagaaaagtaacacctaacgaacagacaaacaaacacaaaaactggtgacagtctcaacattctcaaatgttttgctcaagcactctattactgttagtattgctcatttcatttaattgtaaataaggtagattttgctgctaagcaaaatgatagaagctagatcttcctaaggacaaacagttataagaacatctgtacctgagggcaaaccaccagaaaaagcaagaaaaactcctaatagtgagacagaatgagggaaaggggagaaagactaaaatgtacctgccaagaaaatggcatatgtttaacagatccaggtaactcttttttgatgattgcagtaacagataaatgcagactgacctctgcaccaggtatttctagatatccagatggcactcaagggaagggagcaaccttagcttaaaagttttatttcagaaggtggtggagggttaagaagaaggaaaggtaaagatgtgtcaacatcatcttctacaaggcttgttcatatgttatagtccatttgagaaaggttcatttaaagtatgttttggtgatcaatggttgcccaaataggccctgcctcagtagagaaacccatggagtgccataaagggcatcaaggatagacccaacataaaagactacttacagtaatttaatagcaacttaattcagatcagagctgtgcaataatgaggaacggttaactatgaattgatgtttattgtatgttagaatttgagctaagaatttaacatggattatagattacccacttaattaatcctatagacaatcctgtgagattcattatactaactcattttccaggttagaaaattgaaacagactgaataagaaacttgcctaaagtcatatcgtttctacgtggtaaaggcaagattcatatccagagctgggcattttaagtttactgtagaataaaataaaataaaagcacaattcaaaatatattaaaatatatctaggggagccagctctgagtttaacttacatcacttctggtggattgaatggatttcagtggtcactcagctatattatatataagtaggaaattttctaggtatggaaatatataaactggatcagattctagaagacagctggtggccaatattatctttattattctctactgatagaatagtatgcatcctcttatatcaacagagaagaaagattataaaagattgatactaatccaaatatagtttttttaaattgtttccaagcttgtcctcttgctggttcacaattgggtcaagcacaatttttaaaaatatatattattcatctttaggcaaagtttccttacaattcttaaatcaaagggagtaggaagtttgcattacctaagaaaatagaaataaaagaaaaaatgaacatggaacagattactatttcaatatgctgcaggatatttgcaaaaatatttaaaagagagttacttttctaaagcattaatttagaagctaaaaatctgaaaattgaattgataaataatggtttcattttaagaaagatcttaaaatgttatatgagaaaattaggtcatatcactttttttttttaacattgttagtcttcaggatttttggcataatttatatgtgtaaatttatgtttttgtcttatattaatattttagggctctgtgtttcatttctttcattttactgctttccttgatctcattacttatgattaattagaatttttcaaaacctaacctggcacaaataaataccaatgaaagaaataagaaaatattggcccttctatcacaattaatgtagcatattaataatatataatattacaatttacaatagtttctaaatataaatttcctcatatttttctcacgaaaacctgtgagttaaataaggcaggaattattattgtcattttactgataaataaactgatctttcaagaagtaaaattacttgcctaaagttatgcagcttaataacttacgaataaaacatttgtttacaatatatacacagaaacacaaacacacacacacacacacacacacacacccatccccaggaactgccgatttctagcataaatctactgtaactcagaactgaattaataattatctagtttgctgataagttgacattttgacaaatgtgtctcagtataagaggaaaccatacaaagatgaatgtatttacaagtttatttgaatcataatacgaatgggcttaacttccaattctttattcaattggtccatattttatcaattttatttaaacaaataaatgggtacgattctattgctttcaatagataaaactgaatcagactgatggtatcaataattatgttaaacctatcaaagtatttgagggctttgtggtagaagttaaatgtgataatccacggaagcacttagcaagtgcctggtatacagtaagtgctccacaattatgtgagtaacatgctgctttataactaatcacaaagaagtgatctggcactatgaataagatatatcttgactttcataattttagattactggataatctcctgaccaatgcagttggattatttccaacctcccacatacaatgtttttcttgaataattcagtgggaaataaaggagataaatgaagtctcagaaaatcagttgcagcttcaacctcattttgacatttccttctaagtacttccatccacacaagtgaaatgctgttgctgcccccagagacaccgctgatgagcccatgcttgtcacctaattcaggaattgcccttatgttgattggcctatggcccatagtgcgaccacacataaaagatctgcacagacaggaatagtggtaataaacaaaaacaatcagaggctctcctacaaattctaattagagataaaggagtcagtaagtagtacaaagaaaagcacaaaaatcacatatggagaaaagaggcaaactgagtaaagttactcagcagtagactagtagaacagtgattcacaaactctgccatggatccccgtcaagcttccaagtgctaaacttcattctggtgtctactagacattgctatcatgaggttcttgttctctcttgagctcttaatcatgtagctattttacaaaaactatggttactgccttctttacatctttgtcaatccttcaaaagcatttccattatttaagtaatgtaagtgaactctcaacaaaacagtctactaactccagggtactttttgatacatatacctgctgggttatatagtcattgcctgttctgagtttgagaagacggttaagacaataatcacatcacgcatgagatacattctagtatattttatacaacaggttagcaaatacttctgttaatggcagggagactgttactttagtaaataacctgagcttattgataagggaaacttgatagcaattggagaattagaattagaattagaatctctaattctccaactggtaaatgactcctctaaatagtttattcaagatgaacattggctttacaagaaatcttcacagccaataaagtagacactagctgtggtttataaaagctgaaaacactattaaatatttcagttctctctgatagtgttatatttgactctacttagccaaacatgtcaatttcataagaaatctataaaatgttattgttaaatgggaatcttatcaatgaccggtgcatttttaatttcaatatgatagcagaaggcaaccaatataagtcatatgaaaagacatatttggattttttttttttttttgctacaaggcaagggtcatctgaaacatttcccatttcatattttgacaatttatccttcattgtttaacataaagccttctagttttccttgtttcataaaatttgaacaatcatgaggtggtagtagcccatttatctcatggtaaatttcaaatgaacttacacatggtttagatgggtttaaagtggcagctgtaatttttgttgggtatatgcagctgtctgtaatgattctggtcatacattttcattcaccttattgtctgaatattttctaaaggaaaataggtgtgtatgtatttgcttggcccaactttgatatgtcttgctggctttcatcacctttggaagaaattgcatttcccagtaagctgttccacagtggaatgataagtgatgaccatcctgtggattttcacagctgtacaaaagacattcaggtgcacttgtcttttgaatcagaacccagttagcccctcgcacatttacaaaattgcttttgggagagtcaaacctggatgacttccaagctagttaaaaataattctgaagaaaagtgcagtgctggttcttggcggtagaaatgtgagttatgttcagctgcagtagattcctttcaggcagttctgatacccatttcaacttccaaatttctggcagacgttatcttgtactttcagcttttttgtgataaacatattgaaaattcagtcaaacagctttttatcatttcaaaacttgagctcaaatttaatcctgctgccctgatgaagcctgggaagctgctagggcattttcattatatccagactggactgcagaactccttgccattcttcaggactctgacagcatcattcatttagaacaatgtgatcgatccagaagaagccagcagcaacaaactctgggtactcatacggaagagcatatcctatctagttgaaaaatgtttccgtcttcattcttagcctagagataaaatatcccatcatttggactttagatcctagaagatcttacagattttcctacagtatattaacagtgtttacatttaaatctcaatcgttagctacagatggataatctccaaccaacaatgttagagttgtctatcattaatacatttcctatttgtaaaaatgtggattgctaactgaacattttgtttcttataaagatttcaggtattatatagaagtaacctactaatctttgatatatgtaggaatagaatactcattagtgttttaggactaacctaagaaaattacgagttcctaagctggccaacactcaagattagaactgatataaatgaatctgaaagttaaagaacaatggagttgaaaaaagatttagaaattatctcatgtaacgattcctgatctaggttcttcaggcactcaaaaataaatggataagcaagtactagtggttcatgaactattttcaatacttataaaattatcatagaaactgtaactaaagagaatgcacaggttaactgaattgtcaattttagcagcatttgattggaattatatcacctctgtggcaaagcttggcatttcttcttattggccaattaactttctatgtaataagatttgttgttgctgctgggaacagggcttgagttttcactgctagagcctcgttagtaagataaaggacttaaagtacctggtaaaaggcaagctgcacagtttaagagaagtttcttgaccttgaattgttgtcctcaacaacaggcagggtacctaagttacacagagggaagacttattttcccataaaacagggtacccttacctaagacaacccaataaagtgtgatgggaaataggacctcacacaggaggagaaagcaaatctaaggtgtaaagtatcggtgggatctagtctgcttctctccattcctcattctagctgtgcatccttttcccactttttcttttcttgaaactactcatgtaaggagccagagcagggatccagggtgacagtgaagaaaccctaggctacagaagcctgaatcaagaccactgtgtgagcttccagccatagctcaatccaggcactcagatcaggaacaagcctgttggtgctttggccattggcattcactgaggagaacagggttctatgcagacatttgattgcctgctgatttctaacagggactgtcctctgttcatggctttccaagagccagcctttatgggagcctctcagaggtgacaaggtcagtatgggcccctcctcacagcactgatgcctcacagatggcatcagctcgtaccacaggcaaccacatgagcttacttgttgaggaatgagcttggtattggtggatggcacgtgatatttgcacacatttattcaacaaatacttattgaacacctgttatatgcttgctaggtactgagatgaaacccggaaccatacattgactctatctttatggggtttacattctagcaggaaaaatatattaagtgtacagttaccaaaaattaccaacaattatgataagtacagtgaaatagaaatacacagtgttatgagacattatagcaggaggatctaatctactctggagcatcagaaacggcttctcagaggaagtagcttgtgaagtttgacaagggtggccatataacctatcatccaaactgaatcacttcagagaaggtaccactttagaaagagggtgccattaacaagtacccacaggataacaggcaccaagaaggatttggttacctgagatatgacctgaaggaataaaatcaggaagaccaagaggaatctgaaaatacccgaaatctgcttctcatggctgggactgttgttttgaactgatcctggcagacttttggcccactgagtgaggactgttgttctatgcttaaggaatgaactattcattggttcaagtctaaaatgttagaactttggctcatattaaattacttgaccattcttagaaggaggccaacacttgacatatcagaacattcctctaagatcacaaggctatcaagaattcaattagaatgaaggtcctttattggcccagttccccagaaatgcattccagaagatatattttgagttgatacatgtaagactctactattactgctcaatgagtgagaaaagagatctagaggtatctgaattgttgactagaaagcatccaccagaacatgtgcaatgaataaacaagattttcctatataaagaaaggttgagagcagataaaattgttcgcttgcaactttacattgtgggtgaacagggagctttcaaaggagctgcagacttgtattaccactgaaggtaattcaactgtcgaccacacgccaggaaagaacctcttaaacagataataagtattcctgataactgccaaagggccttgatatttcagcaagctgcaaaagaaaataaatttaaaaactcacatcttactcaggtaatgcattaactccagatcactacagagaacatttcaattcccacttctataaatatacacctgttcttcatttgtgaggcacccctaacaacacacatacccacctctatgcacagagaggatcttataaacattattcttgctttccttgtacttgggtttgatttctctatttttcagcaagctattagatgtcattaatactccctataatttcaatagtttgttcttttggactaggttcaggcattgaagttaatgtcaaattgacattttttagcctaaacatacttttcccatctttgaataagttaagaataagcattaaaaagtgtcaaaaataaatgaactcgacatttagcttacatatagtaaaaaggtatatcaattatttgctggtaagtgagcacacagggcagagctgataaacatctaactttaagtttgcttctctgctttttttggcaaggaaagagaaaatctttatttgactacagttactttggttttcaacttttaaactagttttttgatatgccaaattcaacacatctttagaccttattaactacctttctgtttgcaactgtatctaacatgttaaattacaaccaggtgcagtaaaaccttaaaaaaatttacctctgtggcccccataatagaaaagaatatttactgactcttctgaacattggaataatgacaacaagcaaacagaattaatataaaatagaaacttctgtgtacttactggtcaagtcagcttaaaattaagctcttgcactcttaacccttaacccttaacaaccctgcgtagcaaacactagtctctactgcaaggctctatctaaaccagtggctgtcagttttggtaagtttaagcattggatggaatgtttattgaaaaaccacattcccaggacccacacccttaaggtctgaaacagccctcaggaatctgcactttcatctgtttaggtgactttgaaatgatagttcaggtactggactttttttttttttttttttttttgagacagagttttgctcttgttgtccaggctggagtgcaatggcacaatcttggctcactgcaacctccgcctcccaggttcaagtgattctcctgtctcagcctcctgagtagctgggattacaggcacatgttaccacacctgactaatttatgtatttttagtagagacaggttttcatcatattggtcagggtggtcttgaactcctgacctcagatgatccagtcacctcggcctcccaaagtgctgggattacaggcataagccaccgcacctgggctcaggtaatggactttgagtatcactgactgctatggttttaatatgtctccaaaactcatgcattagaaacttaaccccgaatgcaacagtgttgggaggtggggcatactgggaggtatttaggttatgaaggtggaactctcataaaggaattagtgcctctttataacgggcctctggaagtggtttctctcttttttgctcttctgccatgttgagtacataacattcatgcccttccactgccactgagtgaggcaagaagcccatcaccagacaccagacgccggcaccttgatcttggacgtgccagtccccagagctgtgagaaataattttctgttcatataaattacccagtttataatattttgtcacagcagcacaaaacagaccaggatcctgacctacattatttcaagtaggaaagataattgtattcttcttaatacttacatctagacacatgctaagtgctatatattatgttaaatcatttaatcttcacaaagatgccatttatgaaatattattgattacattttacagattcagagagtttaataaactgttcaacacattataaacatcaggttccaagtaagaggtgtcagttagattctaaagtcttccctttcctttccaatgctgtatctccgtatatcaaagcaacataattaattgctattttttaaaaaaaattgttcaagcacaaacttacattacaaaacctttcagattcttcagatttaataaataaaatcattcctttcaccaagctctcctgtatcagtgtaatagcagctcagactcttgcccagtggtcaacttctcagctaatcaaagatcttggtttaatgtaggccaaaccaggtcccctgtgtccttatatatccttttgcacttttcaggctttttagatacgttatctcattttattcttctaacggcactaatagatcacacaaaatagatgccatctttgtctgttaataccaaaaatcacaacagggttctcactttgctcctaattcagaagcatcatcatctcagccctttaactctcatatgcagaatttatttgagctgctcccctgccctgtgagcttggcagctttgtgtccctgtgtaacctcatgactgcagccttcatcccagggtgccaacctactcagccaaagatgacattaacagaggatctggctgaaatgccttgacattatttttctctgggaaaggtgtgtaattgcagaaaaactgctccccaattattcaaatttaaacattttatctgatggaaatgatatcatttacatattttgtttcccagtttaaaattgtggtttcatatcttttgtgcttgtatatctgagagttatattaaatttaaaatagctgagtgtattggctcactcctgtaatctcagcagtttgaaaggccaaggcaggaagatcacttgaggccaggattttgagaccagcctggtcaaaatgacaaaaccccatctctactaaaaatacaaaaaattattcaggcgtggtggcgcatgcctgtaatctcagctgcttgtgaggctgaagcactggaatgacttgaacctgggaagcagaggttgcagtgagccgagatagtacccctacactccagcctgagtgacagagtgagactctgtctcaaaaaaaaaaaagaaaaaaaaattacaatggctagccctggatccatttggtaacaatctcattctaatgtatatctttacacagggcaaattttaccagaagccttttaacgataacattttacgaattcaaaagagcctagatctggcaagtgcttggctggcagaagtgaaatgtatggtgtgttcaagaagcatcaattatggctgactgactggaccctgagttaaaagtcagcatggagagagaaaaaaataaatcatcctacgcctttcaaatacacattgtaatgtcccttctacttccacttgacaaatctataaggaaatataggttggggagcatgtgtatgtgtccaaatgtacttcgcaaacaaaaaaaaacagataaattattacatcattaattaacagtggtatttaccaaaacacataacatcttatgtcaatttaaagacctgttggtctattgaggagtagtttgtaactagctaagttcattgataagctaaaatcaaatgtcataggatcctggtcttctttgaaagattgcaatagaaatacaatgtgatgggatttttatatgtttattataacccagatgtacagtaaatcagagcattgctgaatttaaattataccatcacatcctcaacaacgatataaatattgaaggaacagagagataagcaagctatatgaccaatatctaacaataaataggtattaggcttttactttaaaaattaagggcaaattatttaaaatattagaaaaggtagcaagatacttgataaagaatagtgtgaactgacgtctgtcttccacatccctgcccattaccattcccagtagctaaatcaactttagtcaaggttaactaactcctttatatggccacacaggagtcccttggctatacaatttgcactttaatcctctggaagttgcaagaggccaaatgaaatcctcacattcagccagagggaggagagaagaaagccataattcagacctccctgtaatatattaagagaaatctgtcttttttttcagtgtcattgccttggaaggtaaccccttcttgaccctagcatttaaaagctaggttggtgcatgtccaacatcagggtcacagccatttttctgctactcagttcatcttggaactgaaagatagtttcttcccgccatcaatcattacccaaggtaagtgtcacagtatatgggtgcataaggtaaaaacagatgaatattaattggttcattttatagcaccaagtacaatgaacaaaaggcctggagctcagagttggaaactgaaagtttccaggaagaatcaaaatataccaaattctcaatagctatttccttatcttctgacgtgtgctaaattgtactaccaaatgtcaaatatgctgagtagccttggaaacaggctgcaattgtgaactgttagtctaccagagagtcaggatccctagctccatcaccagtatgagcaggataatgggcagatcattctgtttgctttcatctgttaaacataggtagtaacacctagtatatttacagcacagatacattagaataattcagtataaaaagtgtaaaatcagctggaaaaagttaaaagtgctatttaattataatgttatgatgacaaagaatgtgacccataacatccccaaagaaatttaggttaaatttaatatgtggactgtttactggtaaacatggtagaatcatgaataagccattattctatggaaaacaatgcaaaaatttatattaacttcttttactcaaagggtactctttctgtcatccactcaaatagtactgtctagccagaaatgagtttatttttaacactatacaggaaatagcacctcacatatatgtcagtttcagtcatgtggtcatgattaatagtcatcatctgataggcagggtggaatggtgatgtgaacatgggatttcgggttatccctggatccacatctgtattctggtgctttctagttgtgtgacattggggaaccttccactacttgaccttcagtttctattgcctgtgattgtaataaaaatgcttctcacagggttgctgtaaagattaaataagaaactggatgtaaaagtgatttgtaaactgtaaattgtttataaatattgttattatttctatatggatatagagggctcataaatatgccgtctatttctggaaatttaaataacttgtgtaagtttttgtctccaacctaatttcccagatatctttaaatacttctcacaatgaatttccattctactcactgaaagtgaagtcatcgtcccccatcttgtgcattcttgcctttttgcttagtttgcatgcaacactctctcttcctatatctacatgaaaaattcttgatgatcttctctatccatcctttaagtcccaactcaaatgccacttcctctctgaagccctcgctgattattagtttccatatattaatctccatatattgatctcttttctaatccttttgttgcttgaactctcaacgcacttctttttgctgccactcatttaccatttaccatatacacattctttttcacagttatcttttcaaacaaagtttatacatcttatctctaccattagaatacaaggtccttgagattaaagaacatgagttagacctttctagtcccaacaaatctagggaggtgtcttataagcagtagtaaatgtgtgtgatgactgatataaatgaagtaaatgaaaatgtaatgactaatataaaaattggcacaaacatctattccatgcaacaggaagatgttttcaaaaataatattacattccaaaatgattttccagtggcaatttgcatagtgtgccatttcagtgcacatgtttaacagaattagcagaagagagactgatataagacaacccattttaggatttagaaggctaccacagattaaaaactaaaccaatttctgttcacaggggagaaacatttaggaagccgcaatctacagtaactttgggaggaatctgtccattattgactaaattaaaacatgagtcattgaagaaaaagaataaactcaagcaactggctaagtaataatgaaaaataaaataataaaacttggctgaaaaaagataattacagtccacatttcaaataagaaattataaaataaaaacaaataaaacaaattaccttacataagcaagtgatccccatctgccagctcatttgctatgataatgagaacttgttgcattctagttacctaaattatcatatctacttccatctacatataaatatacatctcaatgtaatggaaaagaaatggtttattcaattactggatttccggagctaacaattgttacaatttagttaagtgtcagacaccatgctaggcatctttacaaacaatttatttttaatcctttcaatagtaatcttttgaactccttaactgcttatctcctttatcattaatttaacaataattcctataatattttatgatgtctcttctattagttgctagaactactattctgctctctttctgccatttgttcattcatttattcattatggctaaatacttatttattggctattacatgcaaagtaccatttttagctctaaacaaagagtagtggaaaaagtccattacccaatggagccttcatgttgttactcaattctgtgcactgtgtagtcaaactagattgttagtttcttggaagctatttatttaatttgatttctttgtatcctctggtgtctagtacagtaagtacttaattcaaattggcatgcaatacatatatgttacttcattttaacatgttttaaatattattggattaaatgacatttattcctctactttaaacattataataacactacatcaaattctaattatcaagggaggactcagaggaaagtctaataagccattattcatcacactacatgtacttcctggtaccccaaaagcttgtccccattgaaacacaattattaatgcagattgccaggttgggtttctgttctagttggaacaacatctgtgtttgtaatggccataatgtagctaactgtgaatttttaccatgattttcagtaacagaataaacattctcttgacatttctacacgacaagactatgaaggctatttttaaagtattttgataagatttggcatttgaaaatacgaactcaatttaatatgaaatggacgaatttcacttacaattatagttttaatctgagctgctataacaaaagtagctcaaactgggtgacttaaaccacaaacatttacttctcacagtacaggatgctgaagggtccaaggtcaaggtgccagcagatttcacatctggtgaaggcccacttccaggttcacaggtggcactctttttactgtgccattgcatggcagcagtgacaagggagacctctggggtctcttttgtaagagacccttttgtaaagggactcttttgtaagggaatcacattcatgagggtttcactctcatgatcgaatcacctactaaaggtctcacctgaatatacattgagggttaggatttccacaaatgaattgggaaggcggaataaacatttagtgcactacaacagtttatatgcccactgttctcttcacttttctcagccagacagaagctagggtaatatttttaattcctggtgtccataacgtcagcaattacccgatgttgttttcttcatcacgctttgaaaggcagcacagcataggttaaatgcatggtttttgagccatggtttcagataaaaaataggttcctctctttgggacttttatgagacttattttatacaaacacatataaacatgggtatgttgttatataaatcttgggcataagtgcatgagtatgggagcacaaaaaaaatttggcttagccacattaccgttaaagaaagttggatgtggatcgacacaaataacatgaaggctgggagctgggaagggaaggcatgtttgcagagtaaagaaagatgaagccattctgttctcaaaaatcaaacatgtaaactgtttacagttatatttaatcccccaaaacaacatagttattaatctgtatctgtttatatcacacataaagaaaccagaaacagaaagttttactaatgtactcaagttcatatgatgatttaattcaggatttgacaatgagtacaaagctagatggccaaccaaggacgctcactaattgcagtatgaggaaaataagagcccttctgcagagtttccagctcaaaagcttttaagagacaagccctttgtatgtgtataaagatgtgtgtttgcattcatgtgcctgcgtgtgtgtgaaataaaaatttcatacttgagagaactatggaaaatagcacagtaactcaacagagccattgacatttgatattcttccttccctcccttcctctctccctctcatcctccatctcttctcccttctttctttctttatcactaagctgattagataaaacagaccatttcaaacctctgctttaggatgcgttgcaaatatgttagtttgcatatataaaactaatatataaaagtaaatataaaaatatatttataaatatattcataaatacataatataaaagtaaatattaaaatcctacaacttccaccattgtgaatgcactaaaacacattcaaagaattaaaaatttggaggcttggaggtgtaagattagagacttgtaatctttatccttcaactatcacacatgtttgactatcatatttgagttgtcttcatccctcaactattattattttctgttcattaaacctcttaccataattccagtttaataatccatgcaatggtttgaatgtgggggaaaataatattgtttggtcagtatcatcagtatattcaagcaaaaaattaaaaaaaaaaacaagtatttctatttcaaaataaatatcttatttaaaataagtttcgttttccggctgggtgcggtggctcatggaacctgtaatcccagcactttgggaggccgaggcaagtggatcatgaggtcaggagttcgagaccagcctggccaacatagtgaaatcctgcctctactaaaaatacaaaaaattagccatgcatggtggcatacgcctgtaatcccagctacttgggaggctgaggcaggagaatcgcttgaaccggggaggcggaggttgcagtgagccaagatcacaccattgcactccagcccaggcgacagtgcaagactctgtctaaaaaaaacaaaaacaacaacaacaacaataacaacaatcatttttcattggatttattcttgattgggattattagcataaaagtatctgagaaattgcacataactcaatttctaggtctttatctctctcatcctgaaaggcttccttaggccaactttgcctacttaaatgctttccttatttcaagaccctgttcattcagtggctttcctgaagtctctctgtcatcccaaatacactgcttggagcaacagaaaaggtaaagctgagagagccatcaactatgcccacagtagccctcagacgtgtacaaatacacacagatacatgtttaaagaacaaattacaaaactggtcaatcattaaactcagggtaacacattttcagcctgcacaagatacctagatgtttggctcatgcctttgctgtagatctgtccagcaagtggtctgatttttggatcagaacatgcaatttctgtataactgacacacagatatatatattgtctttcaactttttttttttaaccacatcttgaaccttggaggagttacaatgggaaacttcattttcgaaactcccacaagtaaaatagtgcaaaattcatataaaaccagttacaacatgtctctttcagggtacctccctccctccaatgtaagctacaaatcagccacattaacaaaggtcgcgctgcatcttccagttaatttgaactctttccctatttgcttccatctgtgagcaaacaaaacatctccagtccttaaggggcgcctccccagcattagctgctacttttatgccatactgttggtatggtagctaggaaaaaaatgcagtgcctgaaacaggtatttgcattcctatctacatcaaagggctgaatttttctttcatgggacttagtgttttccagaacacaaaagatccatgcttagccacaatattacattttgcatttataaaccactcttcccagtttctctgagatctcctgcatgtccaaagacactcaagcacttcaccaaagagattctctgttcctgttatcaagtattttaatacaagataacaattacagtttagagaaatgctagaaaaatgcacggaaagctcccaggtgccacttaactctccttccttgctgcattccctctcccaccccatcactgaaacctgagccagccaattagatgaacagcttgtcactcctagatgcagtgcaatgtctgcatcttactgcagctgttaggactgacaattcaattccagtctgcaatcctacaacaaagactctctcgtctggttcctgggagtcagagattctccttgttcatctttgaacctcaaaaatatggatttatcctggagcactcagaaggcttaaatctgtataaatagatagaaacatggaaattgtgaccctagtttagccactagatgactcagctggagtggactcttcggcttccaaggacagctcacatagctgctctctcagaatataccttaaattcccaatcacagagcagggtgccctaagaaccattcaatttccctaggcctgtgaacagcagatttttgccttggcaggttggataatctacaacactctttcatatgtctgtcctgttataaaatcagctctagtttgtactgggctctagaaagcattagagctaagaacaggatcctgaagcatgtatttcagagataactaccctttactaacaacaaatatgtagcatacagattcctctgaggtgcagtaaccacttttgtatttatagttattaaaagaagggaaaacaagaaatcaagggccacctcatttctcatataatgtgttctcctttgtgcctgacagacagacgaggactacatgaagcatgaatcctcaggatacccagtcactaattttttaaagtggaatgagtcctaagtgtcaaggggttttaagtaaagtgaaaattaaagcagttaaaaggaagttatacttaccacttgctatttactggaccttgtggtatgttttttttcatacattattttattttacttcataaaacccaattaattttttcctcataaacatttgggatagatatttttactcatattttacaggtagagaaagttgatatacattaatatgggtgttagtatctgagagaggttaaacaacttcccgaaactagtgagtagcagagctgaaattaaaaacctcaactactacacaccagaattatttaacagagttgaattgtgatttttgcatttctcgggaaatgtcccttggtgaaaactctgagaagagaaaaatgtctgaatttcttctgcaggaggtctctaggctcccactgctctttaaaaatggtgatcataatataagggatatacgtccaatgaatctagtattccatagactctatcaatcttttgcccaatctttgctattcttcaaaattttctgaagctataatttgggcatctccctatcatttactgcattatttctaggctagatgttagtggcaaaataattaaaaaatatggaaccccaaaattgagggtcttcacagcaaaaggaggtgataaacatacaattccccataatacaattaattctgatatatcagcactatgagcagagtactaagagatcataaaggaagaagtaatagcaaattgaaaacaatctaaatcagcaataaaatattggtcaggttaattatgatatatccacacaatggaataccacatagccattaaaatcatattgcagcagaatatttaatgatttggggatacgtttcatatacattgtttagtagacaagcaggctgtaaaataaaagcaatataatttcatttaaaaatatattggaagagtgagaacactttagcaaatgttaataatggttatattaatataaaaaggttaccattattgcttctgctttttgcttttttatgttttgtatagtgaatatgcttttcttttgtaattagaaaaacattcaatacagtttaaaactcaaatcatgttaacaaagacttaacaacaacaaaaatcaatttgaaattctttcgaattggggaaagtaaaattcctaacacacttaagatttatttccacagatggcctcatgagctacaaatacctcactcataaatcgtcttgccttgaatttccactcagtgttctgatatcatgccagatgtgggatcttgccttggtccaactcctcctttgtaattttaaaggcctctcacacttgggatgctgagctagagtcattctcctgcttggtagcttttgagagtgaacagatcacttcgctgtgtattgtcattcagttagtagatgtttctggctgcttcttcaacccatacaatatacctttcctaccaagaaatgtgtgacttctattctctcagccttggtgtaaatccctgaaagtgttaaggagaaaaaaagagcaagaatcctccaagatctataattgcacaggccccaggaaagaagcataaagaaaacagtaactaaaaacaaatgcagaataagacctgaaatacaatatttgaccacagtctaaaagtaaaagcttagaaactggtcaaggatgtcatgtgtcttgtcggttttgaagaactattattcaaagctttccatttaattatggccaaaatgcccaggtctgtttttcttcaaaatccagtgttctgatgactagctacattacccatgcatcttgagatatgctactgggaaaagaggaagaacagtttaaattattgttatgtggaaagtcgggattattaacaaccaacgaatctaggaggaaagccaaaatctgtgaagaaggctttcaatgcctctgggccagctcatctgaattcaagaactggagaaagattttcacttataaagttacccagagggcctggggaagaggtgagtgtcttccagcagctgagcatagatcagtacctgagatcatttacaacctgcatggctgtggtcagaccctaatgcagcctgggctgcagacacaacgtggtcagggtaccaacaggagactcagtgaaaaaggagactgtttctggagaggcctctgaatgatcagctgcataccaaccactgtgttttcgggtttgtttgtgtgcgtgtgtgtgtttcctagtgtgcactgaaaaacatcctaatttatacatgctcatatatcaccagcttgttaattcaacactaaagcaaaaagatgacaggaatacaagttcttgcttcattttttctgttttctctctaatttgtttggtagatgaatggagcatgcacaacatttcagatgtttactcaaatacaagatccattgtgatgatctttattacttttgtaatactaaaacccacagttgtgcttaatcataagatcctctagggtgacactctctaaattaaactaccaagaatttatattttaagtcaagctgtctcctgggtcttaatagtatctgatccagaaaagaaaaaatgagtgttaatagcagggcatacagtactatataaggtgctttaatcatcctaatgaaggaaatgaagatgatgaaatattcctgggaaactttttcatatgcaatgaagcctgtgatgagaaggaacctttagaaatagttttattatttgggtaaatatttctagacttatattcccttattgatatactcaatatcagaaacttagatttattattagagatttttaatccatgattcaaaattgtaataattattttagttgtagctctttatataatgaaattaaactacctgatgcatattaatgaataaataaatgcacttagtcaatctgactagaaaaagatattaatcacgttgtatggctttatatggtaaaacattagctggctagctaaatattacatttttaacttggctgggagattatatataatatacaaaaaagaaaccaaaactatctagacagctaaagaagcaaacaatacacatgaacactattttaaaattgaggtaattaagaaaaaaagaatacatatgtgtgtgtgtgatgaggtattactcatccattcattcatttattaaaaaatatttattgggcaacctgcttgggtcccctttcatgccgtggaagctttcttcttttgctcttcacaataaatcttgctgctgctcactaaacaaaaaacaaacaaataaacaaaaaaactgttgaacacctgatacagggtaggcacgattctaggtggtaggattagaatagtgagcaaaaaagtcaaagtaactgcctttgtggagcttgcttcctgattatcaggttacgtaataattatccacacttggatttgcacattcagatttagattactgtaaatacaaagccaccatgtgtgtgaattagagtaatagaaagaaaatcagaaaatctggttttcaatattatctcgatgtgaccttggccttgtcatttaatctctgaaaaaccttttttttttaacctattaaatgtgttggttggtattatcaaaaataaagttctgtaattttgtgtttcctgatagaagaaaaatatgtttgggctcatgtttatagtgtttatatgtggaaagttttcaacaacttaaaaaaaaaaacccacaaaactctaattgcaatcaacagcaaactgagacaggtattgcagtacttaagtaaagtgatgggtagctcttggcaaagttcatgagaaaaatcaccacactgattacaggtattgtaaagggttgtcagaaacagcaagtaaattgcagagaaagagatccacaaatcctttccttaaaatcactactattatcacggtgttaactgggtaatttttccagcacaaggggcaaatgcatttttaaaaaacataatcagttaaatggtacacatagaaaatgcccttcttacaacagccaatctgaggttattctattaaataaaataagcaaaaacacaaaaataaaagcccacattacatataactacaaaagttatctgtttagaagatagactttattttttcagctttgtaaaacagacttaagaacagaatacagaaatctcagaaatcaagtctcatacagacctaagcaaacctcattaatattcaagataatatttgtaaaaataaactttgaattaatcatgtttgcattatctggtattttcattaaagaacaagagagcatggagttgactataaaatgaaatttgtttctagttgcttatgatttaaacaaaccagcgtcagattaaagagcttttactctcagtaccatagaagctttgtcttggggtgtcctgggcacagtttatgatctagagtcagtgtggatcatatttcccataaattacaatccatttgaggaaactgcttctttaacactgtgtcactgcttgtatacctagcgaggacctgttaatgtgattattctttgtactcttttactcgatcccttaacaacttttatttgtgctgtgattcatgttttcaaagtgctttgatttccattacgtggtttaatcctcaaacacttccttgaagtagataaggcagccatcaagttctctgagcctcagtttccttatttattatatggaaataatagtaataaccttagctgcgcgtggtggcgcccgcctgcaatcccagctacttggaggctgaggcacacataccttatcataaggtttttgtgaagattaaatgagataataatgataaggaggatgatagttacatttcttggtcatttgctatgtgctaaaaactattttaattgtgctacactgttaacttatttaattcttcattgtgaccctaaaaaacaggtgctattatttcctcattttatatttgagaaaactgagtcacagaaaggcaaaacaatttgcccaacgttacaaaaaagtgaccgatctagttaaataatgacagaagccacctagaattatattaacacttgaaataatattacttccctccattagtaaacacaatttcacatcaactaatgatttctacaagactccaatatagtcattttaaatccctaatggaaataagggtaacaaaaattattcagcatacattctatctattctaaataagttgctttgatcctgtacttaaagaaaaataaacaagtaactgaatcttaattcatcaatatcctatatatagtcataaatatcatttgttcaatttaaaagaaattagaatatggccagaaagagtcaggcaagaggactaaataaataagaagtattctaagtattttaaaatgccttttggagctcatggatttggaaggggttagaaaaagagagctgacatttgggaacctttataaaaaaaggtcttaaaaaaaatctatgaagcaagaattatcaagtatcttttaaaagatattgtttgtcaaaaacccttatacttaaagagatataattccttattggattatatttaattttttttccaaaagcaaaactgctacttatgaagtcatctgttaaacaatttatattttattctaagcaaaattccagttacaacatacatgctttgtgaagacacagtcaatgtgttaacactaaagtatcaatgcctaggctataattagtattcaataaatgcttcaattatgaaatatggaaacaagctcctgctagtctatcaacagttataaaatgcatcattacacacacacacacctacacatccttccgtatggctaaaaacaaattttaagttgtttttcttctgccaaaaactatcaaaaaatagatcatgatgatccccaaaagatcaatcactctttatattttaaaaatacatcttaaaaaaacctaacacctagatagtgattttcaagtacagggtacacatattgattaacataatgggaaaattaaagcatttataaagtgctctaaggactaatctactaagaagatttatgtttttaattaaacattttaccatggcaatatataagaagaagatcttggctccactgtcagacttaataaagctagcattgcatgaatcagaagaggagacaggggttttgaatagagaaaggtgggtagatgaggggaaagaatattgagttgggctgaaatcctcatcctgttaacaagtccctgaattactgtcagcgttattgttaagccacagggtatctctttacaaattagagaaaggttacactttatcaagacccattatttctatctgtggaaaactgtcacaacatacttattatggaaacagaatctgtatcattatttaactcccttaaacttaataatcaacagatcaacaatatccatgatgcaaatagcatactgttagatgtagtgacattgtgcactgtacaaacaagcatgcatgcctgattgtcatgtttgagacagagacttcttcatcttattatagacacttatatgactcataatgtccttctgctactaaaaaagagcctgaaaatttggcctacattgtttcagaaaactgagtcccagtcttctcagcatttccacttatcctaataagttaacttataataaggtaataatttgctttacctacttataagatagtctacttctgaggatgacaaaatttaaggactggctttctgagtttgaattgcacacaaagtattcaattgcttttccctacagatgcagaaaaccatcaaccatgtctatgtgtgtgtatgtgtatgtaaataaatttatggcttgttttcccttccatcttttcttgaaataatgttttgacattagtgtaccttaatacatcaatatgtttttggtttgattatgtttttcctgttactgaatgtcctttttggatatatgttagttcttagaaaggctggctatcacctagtgtctataacgttaagaaaatgcctgcctgttaaatatagagacataaagcaaaacaacagctgagcacttgcatcattgttctggagggcaacactgattacccactttagttctgactccaataatacaacttctatctattaactaaataagcagtattttatttaaatgaagactggtatgttttagaaaagtcatctcaggattatagagctagtgtatttaccaaattatccttttctctgacccaaagagtcttgagtgcatggtttatgacagtttgttgaacacactgtgctggaagtaattattatccattatttttagaagggtctaatatgctactgtgaaacctttttttcccctgcatcaaaagaataatattattttactactagtcatatattaaatttcaaaacttgataaagcattatgatccctctaaaatataatgatttataacttgttttcccctcaattttaagttgcattcttatattctatttcttttaatttctaataatcatattttcattgaaacgatctttgttttgattataaattctctaagaactggatgatctctataattgaattattatttccgaaattaggttgaatagctagagtttattctgtgtccctcaataaggtatacactttacaaagtttttctcatttgatccacagagcattttagtttgggtaaaataattatgctcattttgcagatgcaaagttaaaatctgcatagtaagttgtgcagtttcttaaaagatgagggaagtgtcacaatctgtagagctaggatgtgaacccaggaagcctaacttcagacctggggtcttagccacagtgcaagactatgctaaacggcttcagcaagggagcttttacgcatggtcttctgagggtagttgatatggcaattccaaatgatatgaaaaataatgaatcagtgctttccagctgtcctcaatgatttgctccacctgtcttcaggcctttcttttatccatcagcactcttcaccctctcagcacaaagaacagcctccctcggggactgggtagagttgctatctgacacccaaaattcacaccttgcttctttgcattctccctgacatctctattcatcagctcatctgtctgcttcagagtcacaattctcttcaggtttggtttcgaaagcgaggctcaaaatttctgttgttctctgaggctgtggatccctcacactcacaggatgcctcttttcgcatgacagagatgcctaagttcattatccacaggctgcttctgagtgagagagatttcatcctttctaaagaccttcttgactaaagtagttctctttacctttgtcatcttgcagccactctctcgacagatgaggcacccagcatgttctatttccatagcatttacatattattaatagaagcaggccagtatctaaaggatgacattgaagaagagttttttttcacattttaccacagggctctacaagaagatgatcttgccagtgttctcttgaaacaagtttcctttttctcaactcagagaaatgctttttatgtaacatttgtgaaagattcttatggtctactatttttttaaatttcctattgtcggcctgactggcactgtgaaatgacatcaatattgtcagattcaaccaagagtcattatagccacaataaaataccatgtctccagaaactatttatttaagtataaaaaggaatcaagcataactttaatgagatttctcagactgtgtgtctgcctgaaagaaatgtgttccctctgtccagtcaatgagaggatcagagctctttccagctttctctcattacctgcttgttgactagtgcagccttcaaaaagataaccaaagactccctacatctctcagatgctatgtaatttattgtgatgtaatgtattggtctataattatgtcttcattttttcgtccactttgactacaaaatcttcctttatctttcttgttttcttttttttttttttttttgagacggagtcttgctctgtcgcacaggctggagtgcagtggcgcgatctgggctaactgcaagctccgcctcccgggttcacgccattctcctgcctcagcctcccaagtagctgggactacaggcgcccgccaccacacccagctaatttttttgtatttttagtagagacagggtttcaccgcgttagccaggatggtctggatctcctgaccttgtcatccgcctgcctccgcctcccaaagtgctgggattacaggcgtgagccaccgcgcccggccttcccttatctttcttactgtgattgcatttactctgagacttttagctttatccttgactgtaactcaggcaaattactaattacaatcttctttaaacttctgatattgatttctggctttatttttctaatccatgctgtactctgatttaatagaaatttttaagaaacaccaatgaaattaaagtttggctattactttcacataatacatattattcttcttctataaaaacaaacataacaactcataaaaaatgacaagaaatggaaataaaacatagggatcaaactggaatgacttctaaaaatagctagagttactgatttactataaaaactaaacagaaagtttgcaagtcaaaaataagtttattctgattattcttttgtaagttcgctgttcgaaattttaaatgcacttatattcactaccacataccaggaaacatcttggtaaacagagatttttaaatcagagtcagaaaaaaatgttatccggcagatacagaaataaagtgagggatggagaggttgagttaccttattgagaccttggcaagaccaaaagcaccaatgatctagaatggtggctggtggttctcaaggtatagttaagggataatgtgcattagcatcaccataaatgtttattaaaactgcacaccctagaactcatctctgatctattgtgtcagactaagagtgaaacctggaaacctgcatttcaaagatacttcccaggtgactgtgcaacaaaattagagaatttttcatagctatcaatttatagataagcaatacagaattagaaagtgaaaataaagacgcaacccagtttgtacatttaaaattcttctcatccagttgcatgatttgcattaggcatgccttgttttcgtttggctgttgggataacgggcccagttatcttatatcttgtctatattctgttactgtcagagaaaaggcaaatttaagtcttatttgaaatgtgtgccttcatctgggtcataaaagttaggtgtgacctttaagtacttcatagagtcttaaaaatatgtcagtttcacatatatatgtacgtgaccaatgaacttaatatatatcacctttcaggctgaacataaaagcacatgtactttcttagtgtaaaatgaggtagaaaggtaaatattttaaaacataatttgttccccatatttttacatgcatgtgcctatacatatgaaaaaaattgtgtgttttcttcctagaataaagaaaaaaactaagtaaaaaggaaagaagtcatcaactgaatgaagggagagaaaataaattcctgggaatgtactgttcccaactcaatgttctcagccaacaattgagaatcataattactattaggataaaaatacttcaggccaggcctgaagttagtgatcagctgctaagaggaatagtagttatcaacatcatgagaataacagtagtaaccaagcaaagcaatgcggtctgtacttttcactgaatgaaacatcaggtatttagatcatgttttctttctataattttgcacttgttttcaattacagataattatgtacttacaatattgttttatatgttttatggaaggaaagaactcctcctagctttaaagtaaaatagagcaaaactgacttgaccccgattttcctttaaatccgtatctcaaagtattttaaatctgaagtaaagactacttgtgtcaatgcaacatatatttttgtagacctttgttccttgttgtccaccacttctatgtactatatccctctcacatctgcttttatatctatagcatccggcttgcttaagatccatgatatctcaaattaaactaagaaatagaggcagtgaagctgaatgtacaaaacagaaagtttgatcttagtagactttcttccagtacactgtgttctgttttgtgattcacacccaatgatttgtgtattgtaacaactagctcagattccaatgtggccaatactttcaaaccagacactattcctaaccaaaaatatggcaagtatcccaagaacagaattattaatgtaactgtcttgtcattcactgactgaaatatctaatgaggaaaaggcttctattaaatatactataaataagcatttaacatttggagctttaaatgacacaacagggaaacatttgtgtagactgaaatctatttttattgttgattgaatcagcagtttgtaaggctgccaggcaatggatcagtacacttatagaaaaattaaatttaattgtatttattcactgatgaatagaaaccaacccaagacaagtaaaaattgggaaatattttttttattgctcacatcatagcctgagccaaaactgtgttaaattatttaatttgtgtttctcttatattatagcaaatgggagaaaacaaaaaacaaccttcctaaggagtgctgcgtttgggatggcaaataagcattaagtgattaatgcccaatagtgaccaataaataatttagttatctctgcagactttctgttttcttgtaatattttgtttctttagatacataatacacttgcccttaataatgaaaaagtaaatacaaccataatttattatttttattgggctaccagaagtaactgttgtataaggacaccaatgtgggtggataattggcatgatcttccaaatttgcagattttagagaagattaatatttgataatacagtcttaataatggtcgaccattgaaaatgaggttaaaagcaatcaattttcaaaaagtttactcaatggtttataaagatatttctaagaaattgaacttaactagcaaagattatagttttaatctgtacgtaaaatgtattttttaaatcttctaactacctaaaaactctatttttttcacattcgtatattagcatgtatatgtgtgggaggtatagttctgagatgtttatgtttcatagttcatttgccttaactattagaagttattcttaaagtacttgaagccagaaggtctaaaccaggggtgattttgccccccaagggacatttgacaacatgtaaagacaattttggttgtcacaactaagggagggctattggcatccagtgagtagacgccaaggatactactaaccatcctataagacaaaggacaggcccctatgtcaaagaattctgaggccccacatgtctaccatgccaatcttcagaaaccccgtcctaaccttttaaatttgaccttattttcaagcaaatttcttagttcagaggaagcactcttttaaggtagcaacagaatggtgcatgctagtagtgcctctcttgcccagtgctgctggattggtactgaatttaaactagttaatgtgaatccaggaaaaacaagggcaggtcatcatttcaagataaaatgactaacatgaaactttaatagccctcagtgttgcaccgctttctttgtctttctatgacaataaacatcatatttatgattactttgtttttgttaggtgtgaagatagaattctaatgaaccatcaaatatcataaaaaggcagtgagaacaagcacctggctcaaaggtccactgcctgctcatataaggtcctaaattcactctggtagtctatataaaacaaatgagctgtagaaaaatgctttttctggcagtgtacctatgtaccttaaaacatttctcactaggaaaaaaaaaaaataaagcaaacatatacacataacccccccaaaacaacaaaaaaactctgtgttggctaaaatggcagacacattttaaagtatgcagagcatacatttcagtactaaattattgcaaataaataaatccagagaatgtaaaatgaaatatacaggacttcaacatatccaaatgtcaacgaacaacaagtagttgaaagaccagccttttaatatgcaccaagaccaattcttgggctacaatatacctgttcaaataaaacaaaatcaacttaatgtgaagcatgtgttgaaggtactctatccctttaactatctccacttggctgttagagtgaaatggtgttagactattctcattaacttttaaaagcttaaagaaaagccagaattttacacttctcagagctaataggcctttcgtttattgccaatcttaagtaaaaattcacaagtagaaagatgccaaaacatatttgtctctctggatacctttataatttttttttaatttcaccaaatcaatatttacatattttatattttaatttatacttttcatatgctaaaattatttttataatgcacttaatggcttacaaagattaacacaaatagcaaataaaaaataaatctaaaaatgtaatgaaacgtaccaagaacacaagaaaaagagaaaataagaacaatgagatggagacagaaagagaggcacacaatttacagtcctagagactcacttgtagaagccactgggaattttgaaaatgtcagattgtatctcaataaataactataaaatatgagctcagaatataccatatcccatatcctaagacactgcagtccctcattttggtaaaactattgtttgtcttttctttgccatgtcctgtctttaaaaataaatatcctattgtaatttaataactctctttatctcagctatgctacgtccctcaattagtcccatacccaaatggctcacaaacacacaacactcttttcttaggtccagatccacatattcacctacctatttgacatcttttgttatataacctcaagatatctccactgttattgatagctccctctgcttcattctataacctatacatctgccgtactgccaactttccatttttactaccttcatccaggtccaagacattatgatagcaactactgcaatagctttttaatgggctctcagacattcactccaaaatcccctaatctgtgaaagcaaatctggtcatattagctcttcataaaatattaaacagtttccctttgcaattttaaaataaaaacaaactctttaatatgaccaaaaagtattgacttggtcttgaaacaaaacaccatttcaatcacatttcaacccccctgcttcccgtatttcagctactatggaacttcatttccattctcccagctccattctaccataggacctttgaacatgctgtgtttcctctacataacatccttttttcctttacattaaacatcttgtcatctggttcaccccattcctctttctgaattcatcacaaatgtcatttctttagaaaagttttctcagatcccttcactaggcccaacctgcctaagggagtctcatagagctctgtggtcctccctcttcttcctgacatagatgcaattttgtgtgtgtttgtggaacgccctagtgagtgtctttacgcttcacaaggatagtgatatggcttggctgtgtccccacccaaatcttatcttgaattgcagctcccataattcccatctgttatagggcggacctggtgagagataattgaatcacgagggcggtttccaccatggaaactggttcttgtggtagtgaataagtctcacaagatctgatggttttataaggggagaaaccccttttgcttggttctcattctctcttgtctgctgccatgtaagacatgcctttcgccttctgccatgattgtgaggcctctccagacatgtggaactgttagtttgttaaactttttctttataaattacccagtcctgggtatgcctttatcaggagcgtgaaaacgaacaaatacagatatcaaagagggcagaaaccatgactttatttttgctcattactagaccctcaagtctaatgcccgttcttgacacttaatgcctgtccaacaaatacttgccaaatgaataaatggatattatagtggtatcttgaattaagaatgataaaagtcaaccaggcatggtggtgcatgcctgtaatcccagcactttgggaggctgaggtgggtgggtcacctgaggtaaggagtttgagaccaacctggccaacatgatgaaaccccatccctactaaaaatacaaaaaattagctgggcatggcagtgcgtgcctgtaatcccagctacttgggaggctgaggcagcctggacaacaagagcaaaactccatttcaaaaaaaaagataaataaaagttaactatttgagatgttggtgctaatttctgaaccagtgatatacactgtgtagaaaggcacataatggcataaaaggtcagtgtttgaaaattattaaaaggataacataatgccccaagaccaataataaattcttacatatagaactcttatggtactgtttatacacattgttttattactccagatactctatgggacagaggatattattctcctttttatcaagagaaaactgagcttaaaaaagttaagtaactttctcaaagtgttttaaaatgtaaatgatagagctgggatgtgaacccaggttgtagtcatttcaaagtccgtgacctctatgctgcatagcattagtagtgtctaaatttaggtgactatttgggggaggaggtcatgaattttttttaatgttaataatcttcattcatttaataattttggatgatcgccctctataacagagacttctacatttcatgtaaatataccagggtaaaactttgcaatttttaaaatcacagcattaactatacaatggggtcactcaatgaaaatcgtttatgaatatgaccgaagatttcattataaaaacacccaccaccagtagcccaaaaacattacaacaaggctcttgtgtggaaaaaaaagtatttctctttaagaaagacttttcttctttttttttaatcactggcacaaaaattttctcagaaaacactaaggaatatcaaccaatcaaagacacaaaggtttatcaaggaaggtttatggaaagcaaatgttctccaaatatgcaaatccaaaaaggaaggacaaggctgggtgaaccctgtctgcagatagcacagagtaactgagtaatcacagagtaattgtgactgtttcaagaactgtgtttcagatcatgttaacttgaggaacaataaataaatcttgctaattcagtgaaactgctggttttatgaagaacctattgtgggccaatattttataattcaatattagtgatacactgggcaaattttctcattaatgacactgcatcatcaaactgcataaatgctccactgaccctaactatttgctactgacctccacagtttgctggaagtagcagttgtgtatgtattccaaatttaaaaagcaaatttctatttcaaaggacagatctgtgactgcctttaaacaatacagactcatttaatatctaatttattcagaactgaaataatgtcacacaaaaagctctacttttgtttttcagtaacagtatggaagctgtgatttctgagcaataatagaagaatacttcagcctctcagccattacagtaagcagagaatgcaagagaatgcatgagttcttttgtggaaattggcagataatggcagcttttctgaaatctcccacttttttaaattggcaatccgataaaacctttaaatttggggagtgggaggaggaaatgtttcaataaccacatattaaaaataacttgctaaagaaaggccttgaggctctcggatatactaagaacaaacaatcaaatgtatcctgtacctgggaagacaaaagcctcacaatcacgatgttaaaaggcaagaaccttgggctccagaggttaaagggtagcatcctgatgccataattaggcaactggatgcatagcaagaagagttctggaggggcaattagaattgtcaccagatccatcctggatacatcactaagtgtctctaagccttagttttctgtctttggaacacttggtttggctcagtgctctattaggcctagcctggaattcaagattctaaactctcagcaggaattttacctacaaagaaatataaaactagactccacatttttgagtcctaattcagagacaatgttgataatttttatatcattgtatgtcacaaatctgtagatgtcaaaaattcttacaaatccttatgattatggattttctgacagtacagtagaaatcgaccaagggcactgggttcattgaggatattttattaatgagacttactttttgattaaaaagtatgtattaatattgatttcaacatacctccattatgcaatgtgactgaaaacagaaaatactagtcacaaagtgaaatgtaattctatttcttttaaatacttctgcacctatccatttaaaaatatttggatgaaccacaaaaaatgtctattatgcatcaattttttacctaagcaaacctgcaattttatacgttttaaactgaatgaacttgtttgtatgtgtgtataacatgaattaaaatgctaggtaattccaataatcaacaggatatcctgcattatcagaccttactaaataaaacaagcttttatcggctacttactctattgcattggtcttaactctattccataatggcacagtttaaatcaatgttttatttttatattatcattttcctaaatgcacatagcaggaggggaattttaacattgtcttcattattttataggaagtatcacagattatgtaagtatcttgtccaatggggataatatgaagataggctaaagtcttttggggcttaaaaacttagtacatcaaaaggaaatatgtggagttattcaggcatatgtcttttattgtcattgaaacataatagaatttggttacctttatggttattcaaatgctgaaaaaattatctgtgatttaaaaaaatcaactggcagcataagcactgtcatcagttgatgctgatttctctaagctccttagcctttatatcacttctactcgtacaagggatgctttgtatatttctcaggcaagtttctcattttattttgttttgtttttaaattctaagtagctttaaaaattgtgctattgttccatctattcttctttccaattttgttaggcatttagtgacagtgggctttggtggaaacttatccattgctcagaccagggacatgagtcttgattagccaagacattcctggtagaacccttctaatgcctgtgactggctcagaaaagggccaatgacactggaggaaaactgctggggaacttatgggaaaggttctcatttgaaacatacacccacccagcatcctagtttatctaaggatgcagttatatgaggatgcaatgaatgaaactactgcacccattttgtgatcacagtgcgacataactaagggcaaaagccaatatgctgaagatggcagagtgaagatgtccaggttctaaagaacctggagttgtcaaactacctgagctttggattttttgttgtgtgacctaataaactggtgtattttctccttaaagagaaagatcacatttctgtatgtgtgtttgactgtgtgaatatgtgtgcctgtgtacgtatataaaatggtcaataaaatgttaatgctgattttttaaatgagtttttttccagtatttctttactggcagaattaaagttggttataatctcccccactttttatgcatgttcctatatttagtgtaggagagttaaaaggacaaggaggaaggatgaggcaaaaagatggaataaaattttattttggaatcagaaattgattactaagaacagtgacttgaagcaattcacttttggagtatctgtcataatcaataactacccacagcttggttaatgaacgttatttttagttgaattactaacaaaggaaacaattagatatgatcaccaacattttcatgcattaatgccagtgcaaattaactcctaccactaaaattactccttctgtctgtcaaaatctgtgacggctatgacttactgcacgcagagcataattgtgtctccctgcctgcataaagctgacacataaaatcaatattaattaaaaaaagatcaaaattgtcctcattatcttatttggctgtctctccaaaatagggttaccatttatgacagaataaaacagagtctggacttaaatgattcctcctgccaaataataaatgatccttttattggttggatctattaataaatatctatttctctatggatgaagttatgcatagtgtaactttgaaaaaggacccaatgtctaactataaattcatctagactatctatgacactttgccatggatatatttttgttctacacatctgtattctctattctctcctctgcccaaatgctcctaatacaagaaaagaataatcatttatatcagaagttgaggatcactgtgccctgcagaatgtatataatttatttgacattttatcttttctattataatgaatacaattttaagttttattattattacacatttattttaatgaaaaatttgtgggttcctaaaatactgagagaaatatgtgagctcaggagatttctcatgttcatcaggaggttttgcaaatttgtgcctcagtttatgaggtttcatgatacttcttttcctttccactccattttcttcatgctggctttccacacagcaccttaatgaataaaatgacaattccagagaatgttaccatcactaggatgacttagtatggaaccctaaccctaatcatctcaaatcgattgacccccagaaacaaaaatcacagggttagtttcttctgttctttcctgctcccagtgatgccttacagacatctctgagaactgggagtctacatgatgtgagatattttcttattaccatcaaaactcattcaaacaatattcgctttaataagttggtgtttacttgccaacaaatatcaataactcacaaccacaaaaaataattaaaaaggaaaagaaaataaaagaaatataggtggtttatgaatattcaatcaatcactttaaaccacaggtaattttatcacttattttgtcccattttaacaatttatgctcaagatatagtaaaatgaagtaaagcttaaacctttgactaaatgtttcaaagagaaagaaatttaactttgagaattgcaatatttacatatatataaatgcaatatttacatatatatatatatactcttttttcttttctgcccttaaattgccacttatacatagagtacatcacttctgctatccaaatgatttggtttgctttacagaaacccaagtttggcactttgggaggccgaggcaggtggatcacaaagtcaggggctcaagaccatcaccctgtctctactaaaaataacaaaaattagcggggcatggtggcgggtgcctgtaattccagctacttgggaggctgaggcaggagaatcgtttgagcccgggaggcggaggttgcagtgagccaagatcacgccactacacttcagcctgggtgacagacggagactccgtctcaaaaaaaaaaaaaaaagaaaaaagaaacccaagtctatatgattataggcaaattatttaatttccatatctcaacgttctaattcatgaaataagcatcataatactactcacctaataggtcccttgagaggattgagtcctcaataaatggtaactgctactattaataaataataacatcggcagattctaacactcagtcatatagacaataacttcaggaaatattctccacaacattacttacttccacattttcacattaaaggtgaggaaaattgatttctgaagttcagtagatagacccaaaatcatcctccaattagctggtggcatagactgaacaagtgaagagacaatgttcaaggtcactagaacttgctgtagcacatgtgaaaattgtagcagaaataaaagtataagaaaagacagtggtttccaaaataacactgacattttcactatagagagatgacaacaaaattagaacatttaaatatttttaaaggatttgttttctcttctatgacaaaaatttgattttacttttgcattagtgaagcgatatgctttttgaacttgaggttaggtgggtccctacctcgtgtctttgttgctatcagtttgtacaactaaaatctaaatgcctcggtttccttctaggaattatgagctatgcacttaaaattcactgaaattttaaagtgggtatgctctactaacaaaattaataagaagatgttaattgagggtggcaaactaaatacaggaaactgctcagcatttttttgtcagaaaatatttcaaatgagacaattttgtgcctcaagagtttatgttagctgggaaatggagaagggaagttgggagaatatctgaagaaagggaacatttaatgaacattaaataataagacttaatgttaagcacttcccacatcaattttgttttccagaaatccaatgagaaaggtaatttgcagatgaaaagaaaatggaatgtcagttaatttgacaaatgtcaaagacatgtttaaaactttgaaacttatctaacagatttaaccatcacgtgatcttttaaaccctcactacagtcccatcttctccttttccttacttataaaacaaccctagatttccttttcagtgttaaatagtattctaccttgaaaagaagtaagacatgactactttatactgaatttattcaataaagaaagaatttgatcacacatttctgaataattactgctttgtgacaaaatgaaaattaatggaaacagaaagtttcctccttcatagaatcaccatttactcactagctttgaaactaattctagcccaagattgccctcaaaccaggtccaaacacaaactgtaatccttataaacaccataactatgcagggtggaattatcacccacactgagccttttctttcaagtgttatttctgatttcacatgtgttgagaacatttatatacaagacctgagctacacaattttaaatgttattacttgtaaaatataagctgtgtctttatagtcacatatctttataatgttacaagaaggaataataatataaacaccatcacagttaatttataataatttggtaaaaacaataatattttaataatgaagctaaggtaatatttgtaagcaaaggaaatccccaatgtggaacaaaaaagaatgaacagcaaagaggccatcaagacctcacaagtgctcatctccccagatataagtacttggtcaatatatgtaagaaaatattttctctctaatgataagaataaaaacattaattataacaagatataattaataatcagttactacttatcgagaatctattaaatctgaattattccattcatatttttaaagggcttgtatatatacatagtttttcatatgcgggtatatggacccatatacatataaatggtccttcatttattctattgaccttcggaaacttgttttccccattttatagatgatcaaattgaggtccaggctacttaagtgacttcactgaagcaaaatccaagtagagagatattacctgtttaattagttgacatgcactgagctttagattgtgaatatgtatattcataataataagattatggttacatgaaactgtaaaaaatgctgttcttttctagggaaataaacacatgtttagcacagaatgttaaaagtagcatggagtagtatgagataaaattaaacatttgctttcaaggttatggcaacaaatgaccacaaagagaaaaaatgataactgaatcataattttctgacaatctcttggtgtttctgtattcctcctttgtgcttcacatgctgccctctcagtgaaaagcaactataagcacatagtctccaactgagcatgcggctggaaggcatgcaccatcatggttaattaggcaggcttcagaattcagcaagtagggtgaatcttagctatatcacttcctagctaggcaaccttgggcaagcatttaatctctccaaatctctgttactcatctatacaataaagttgataatagtatctacatgaaatgactatagctagaattaaataaggccagggctatcacaatacttggtccatagtaagtgctcagtaaatcatgcttatttttatatttatatctgcccccccccaggactgaaaaaaaaccactttaactttttcctctagaggtattactgctaataagtgcctcccctcccctcccttcccttcctctcccttcccctcccctccccttccctccctttttctctttccattgagaaaaccaaatctaacatgaacatggcattttcctttctgtcttggtatagcctatcatttctggattcaccatatggttaatagatggtggtgagacatagtgtggtatattagttcattcccatgctgctgataaagacataagcaagactgggtaatttataaaggaaagaggtttaattgattcacagatcagcatgcctggggaggcctcagaaaacttacaatcatggtcgaaggggaagcaaacatgtccttcctcacatggcagcaggagacagaagaacgagaaccgattaaagggggaagccccttgtaaaatcatcagatctcatgagaacttactcaccatcatgagaatagcatgggggaactacccccatgattcaattacatcccactgggtccctttcatcacacgtggggattatgggaactacaattcaagatgaaatttgggtggggacatagctaaaccatatcaggtggaaattttaaaacagtaatcaagaagacagaacccttcctctcactgccaatgggacaactagcccagcctcttctgtgttcagatcatagcagcatctagcagtgacttgaagctagggaagctccatttcaatttctgagctaaaactttttctcctggcacccaaatttatatttctgaatcagttttgccgtagaaaaattgttatgcatggtggggaagttctaaagttgttgtacattattacctacctcaagaacattaaggattaaggaggcttccaagagctcactggtgtgaggggctggtgagcaagcgtactactgtatcaatgaaaagatgagggatgggcacaggggctcatgcctgtaatcctaaaactttgggagactcaggcaggaggactgcttgaggtcaggagtttgagaccagcctgggcaacataatgaaacctcatatctacaaaaaattttaaaaattggccaggcatagtggtgtctgcctgtggtcccagctacatggaagctgaggcagaaggatggcttaagcccaggagcttgaggctgcagtgagccatgattatgatactacactgcagcctgggcaacagagcaagaccctgtctcaaaacaacaacaacaacaacaacaacaacaacaacaacaaaaatgtggtctgattttcaagtacaattcacaaaggcacatttgaaacacaatccactcagagactgggggctgcttttccctttcttttcattggccactggccactagagggctgctgtgagtcatcccccttgtcagaggctcttaaggctcatagttctgaaattaggatgcatttcaagggcgggaccaaattctcctccacttctacagtatctgcagagtgtctagaaatgagaaggaccgtttcaagagctcataaatatcctgttgtggaagacagatgaatgctctgggttggaagcaaatttttttttaacacatacctagggaacttatgaacactctagttagcttcttcaatgtgtctgaagactgctcacactcctgttgacaagtaaagagggtgaactctaagaagtatatttaaatgcaaaaatgaacccagttcatgtgcttttcttgtactctctgtgttttagggtagattatcatgagtggtaaagaagatagagaccggcattagagggtggggcttagatacacactcatatacaacgggtcatttaggttgcacaaaaatcagaaagatggccacagatcagaagtggttttccactcaaaccactgacctctgggttgtctttctgaagaacttctttcctgttggttagagtttacttggtatgttcttgacccgtgagacaggaatgaggagatcagacaaatgggaggtcagaaaggaggaagagattattcccatgtggaatgaggtttcctaatttatagattcctctgtggatgtttggtggaaacaaacctctccccatttgcttaattttctcttgctcttcacacaacacagtcaaccatatgttagactcttgaaggttccatctctttccctggttttcttttaattctatttcctctcaccccaagccaatccagagggtggaattccaacttcgattcagacatcaaagccagtgtggccacacttgatctatctcatcttctttaatagacttaattcttctcaaggcaggtcaagattctattatctttggtaattttatctaattcattaatcaagaacaggattttctacatgagtaatatgagtaataataatatccatctatgtgctaatcttctaattattttacacatattacttcgtttcttctatgaacagcctatcaggaaaattgctggcaacattttagagatgaagatactgaagcacactgtggttgagcaacttgcccaaggctcgcaaccaggagaaggtgtatatgggatgtgatcaccaaaagtctgttttccatatcatcaacactgtcctagctgtggctaaacacctctacctctgctatgaccagcagtctctatttttgagctgcacctagcatgcaccagacatgataatgataatctcacaagcatcacttcccttagtattcaaaacaacatcatcagctgggtactgtccccacgtatagacgaagaaacagaggcttggcagagtttagtgcgatatcagaggtcacacctctagtaataacccaaccaagactgctgaatgtttctctgactgcaaaggctgtacttttacccagcaaatcatgttgctcctatagaaagactgcacccaaccgtccctggaaataccataggcctgttttagcacactgcgcagcactgataaggttaaatagaaactgtgattatgcatcactgcattgctaatatctctatgaataaaatgtcgatttgattttcatttaacctcaaaagaatctgattaccaaataaccattgaagaattattggcaattatgttctgtaattatggtgcctgttaatgtcattagcgtacagcctttcatatttagtactattaattaatccccataagcatagaaatttataatcaatataacaaaggctccatggtaaattataaatactcccgaaatccctccaacagtttacagggctccgtgggcttccttggttgggacacatttagtttgggggctgcaagaatctgtggtaattgatagcttttcacccggaatcggctatctcactaatgtgcctaattaggcaaatgcttaaaactggagtcccaactgccactgacaactataaattcctgtagggcaatcaaaataattaactgcttgagtcaagagacccacaaatcagatatacaacttttcaattctctgagcaatatactgcttcagataacaactactgtcagtgagtgtctggtttcggttttggaggagttgaatacagtaagtatgtctaatgttaaaagtccaaaaaagattcatgatagctctatctcacagatatgcaagataaacatgcatgctcacagtgatgctaggaatggatgctttgtaaagcactggtctaagaatatcatgtttttcaaaatctcccaatccatcctcagattttcttttacacattttctcaaactgaaacgtataagtctgttttatagaaaacctattttgtttttgtaattttaaacatctacattaatatacatcagattttttaaatggttacattcacatattttatctgaaacaactactgctataattgtctaaagatgcagcaagctgcctcagaagtggtacattctaataagatgtggcatgataatctattctgcattgttcagaattggactagttggtttctgaggccctgctctatgttagaatctaaaagtccgtgaatcccattcttttttcccacagagaaaagggattagaacttgctccctgttggcatcccacgccctttcctgattccattcttgttctggacaatttcccaggaattagtgcataaccctctacagctgctgggcctcagaaacaatttgggaggagaaaatagaggctcagaataaagaaaatatctattaaagcattattgcatcaaatataatggagaacatgttcatcttttaaaaattcaaaaggaagaatatgacacatttaggaggcatccaaaaatcacctttttcagataaataactgttagtggagaaataaaattaacttgcaatttggaagaattagtaggcagaattataatatttaagatctgaaaataacctcaaaggtcatttgaatccaatattccattttacaaatgagtaaggtgaaattcagaaagggtaaataacttatccaaggtcccaagtacattgatggctgaaatggaactggaaatggagatatcttaactaccccatcttccaccacccctaaactaaatggttaattaaatttaaaagcttattacagggtatgcttaaaggcacaacttcagattcgtggttttaaaataaaagattgtatcctaacatcgctgacaaccacagttagcatggattctcagtcttgtcaagatgcagaagtaagatatgcatagacattgggatgggagatcttatcaggtcctgtagttctattctacgagctttcagtaagttttatacaaactaaaacaataataataataatggatgataacgacaggagcctatactattttgaggctgaaacaactacatctcacataatttgtcacatagcattcagagccctcatctgacctgtagtcatttttttcatttctgttttggtggcttctatagctttttatttatttgtgtttgtatttttttgaattagttgtcagtagtcaaaaattaaaaaatgtcacagaaaacctgactacaattttcttacatgtagctcactagttgttaaaaagcagagaaataaaaaaggaagagaagagaaaagaagagaagaggaaagaaagaaaaccaaagaaagaacctaatgcaaatgatgagataatggatgcagcaaaccaacatgacacatgtatacatatgtaacaaacctgcatgttgtgcgcatgtaccctagagctgaaagtataataataataaaaaaagaaaaccaaagaattccttctgtgcttggctcagcagcgttggagttcctgactccactttaatgtttccttagtctagcaccaccaccaaagttcttatacaaatcattttaaccaccaccgaagtactgacacaagcattactagccgaagtggttgtagatttccttgaaattaaaaatatgtttcacctttgtagtttcaatgagaataagaaatgaatgtgcagaacgtcattcttaataactatgcttattataagaaaacataaagaatgcataatggagaatgcatatttcttcatgcatgatggttatgggaccagcccttctctgttttatttcctcttccttaataggtagctatgcaataagaacaaattttgaaaaaataagacaaaagaagatattctgatttaaaaggaggtggaggaagaggaggtagtgtcagtggcacaggtagtacctaaagtctacctgaagattctctccaggacatgggttacatgcataaattgggcctctgaaagccttaaactttatctagagatggcatataggctttggatttaacactttctgtgctctatttcatcacatttatagaactgttttcatagctttgaataagtatgagcttattacatgaatatttagtttattacatactactatatacagctgtgattgtgaacagatacacttctgctttttgttgaagataggactgagttagcaatgtctactgtattaaacagaaaaataattctctctggccacttccatattctcccagatcaggacctatacaaacactggggaaaacaaacttccaagtgatggcagcacaatcaagctgttttgtggaaggtataactgctttgcatggttataagcctgccagaaaacatgcaggaattcccaattcccagagcagaaacattgccagcatgtaactctggattccaccccatatgccatatttccagcccatcttcggtcagcacatagtctgtgctcctggggcgtgcaagactgtgaaaaggcctgcataactagctttcatgatgattcctgcattaaagagtaaaagcatctctgttcagctttcaaacagcctacttacccatggccaggaagaaggggaaattaatcatttaattaaattagtcattttccagactaaagataaacttggaatatgactcacttaagcaaaactttccacaggtgtcacttctccaggaagattaagagaagggcccaggtctcctattccagaaaactatttgagggttgaaacctcctccactgtgtatcacctagcacagtgcctagtgaacagtaagaatcaggaaagagttattggattgagtagctattgaattgaaatggaacccagtctgcccactctaaaacagtcactttgaacacagaatgtattaaggtgttatttcacgtgcaggctgttacaaatgttgactcaggctcaaacaaaccttttagcatttttacttttaatccaattgaatgattttacaaaatagggcaaggatataaattcaaataaattaacagtgggtaaaagagcatctagtcctcaaaaaaaaattctttggcctgcctatcatttatatttgtacaattattcctcttctctaaggttcacaacacttaggcttctgaagatggaaatacactgcacagggtattaacttctgccaatggaaataaaactgtaaatgatttggttttgtgattatttaacatataaacatgtgctcattgagaaaaatgatgtctggacaactgacattgtatttctgccaagtaccaagctaatgttcataaaattttactggagggaacccaatgctaactataggatttcaaactgctgatctggagagatgaatcgtgaagcaatctacgttgtatggctaatcagaattcccatccttacccatgctctgaaaagaacctaaaatttctatttggaggcaacttcagaaagctttcattaatttaaattttaaagcagatttcttcccattatgtgtattcaactgaaagcctatttaacacaacaccatgataaaagtgaaaaaaaaaaaaatgtcaggtttttccaaggcatccattttactttattccagaatccagaggcattgaaaatccagggctttctgcatttcttaggatgttttgaaaactaaaaagaactggtgataatttggtgatttcccgttctctgcaatttattttaaacatgtgaaatgaatgactctatgttccttaaagctgcccccaaattaagcaatgtaatagttgataattagatgcatttaattctaatttaatagccatctttatttggcatgctctttatataaatactactcaactgaatcctattaacacttacatggtttattacatttcatctgaggaaaaatgtacatattctaaaagctgcattatttaatcttggtgttaatttactggtatgcttaatgagtttacaggtttagtattatttaaactttgtgaaatatatgtaacttttctttattttacctttaatatttggagaaaaaaaggttctattagggttttcaatatggttataattgtagaatgaaaataagataaaattaaaattaaaaagcagaagtggtacagttctcataattttctacatgcactggagaggaacaggttttcaggaaatctcaaatgggaagtagatgtgttgagcatgttgaactaggaaggctcctagcaaaaacaaatgagatgctgtactgcctctccattacggccaacacagaaggagaaaagaaaatggcatcgtcatggcagtctacaaataactaatcactcccatgcacggttgattttcagtatggagtctggcaggaaaacctcagggactctgtcacccacttgcaggccagcttcacatgacacagtattattattagcagcaatattttgaccatttctagttatcttttctcttcttatctctcccctgaagttgatacaagaaaagattatctgaaaataaagaaaataaataccagaaaaggtttaagtaggaaaaactgcatgtttttaggaaatattctgagtgattagataggggaataaaaagtatgaaacgattatatcatgttctatgtagcctgacaaggtaatccctaagtgagagaattttttactgctgcaaatttgtgtgtgtaaagtgtgactgacaagccacaaacataaattggtaaaaccaaaaggaagtcatttagcagctcattattttacaattttctacatttcaataaattcatcatgacgatttttttttgggggggggcggaattcccaatggcattaatgtactagtttaatagaacaataaaataatattgcaggaaaacatatggctctgccaaaaatattaaactaatataccataaaaggaaaatgaataggtgattcattcactatccatttacaattatttaaattataaaaatgaaagcagcctcttcattttaaaagacaaaagaaaagtcatttagtagtttagtaatcaaacctatgtgagagatcagttatctggttagatattgatctcacttataaatgattttatattacactatgctcctagttcatgatacatatacacacatcctcttattatttattgaacataaatttatatcaaactggctttaagactcttgtaaatttgtgggagctccagttttactaaggcaaagtgagatgcagaatcaactccattttttccaaacaattgattccttatcttctaaaatgccacaattttcattatgccatacaaaatattacggaatgtaaattatcagtaaaatttccttagttatctatttcactgtgaaatatgaacacagcctgtattaataaccatgaattcaaagagaaaatgctttaaatatatatcaggctagcttaatctaagcatattgtttgctgtggttctttttcagaactgaatatcaagctacagtccactctgccgaaagcttccagctttccaaaaactgaaaaccttcgccagtaaatcacaactgttttaccatatgcctctctgttctgccaagcattaccagcttgttctacttttaagcaaatttcattatattatagctcagagcaatgctcattaaaaagtattactgaaaaatgtcaagttgtttttatatagaaactagaatttattttctactgaaaagtcagatatttattgaacacaagacatttttaaaacatagctttcatttcacaagttggttcaacttaatgattatctgaagtactttgggtcttgcaccagttaatgttcactagtatctcccattgatgtagattaaccattgcctttctagaatcaacttagactcagattagtggaaaattctcggtttcttcacctatattcatattctcattgatctgcctattctcctggctccccgccagagccttcttgagaactgctccactggacatactttaggggactgtaaacttcattatagcctattcattatagtataaatacagttcaaagaacactagcttagaaatctcaaccccaccgcttctaattgtgtgattctcaattaagtcagtaacctctcagagtcttcatttccttatttgtaaaatggaatgaaaacagcctgctctgctttttgaacctaattattgtgagcaaaaaagtcagcaatgcatgttccaacattatgtatcccatttaccatatgccaaacacaaaaccagaaagcttcattttaaagcaccaagctccttcccaaggaacagtttttccttctcttcagatagtaaaactcactggccataagagcctgtgatccacaaaagacaggatagatttttattacctgctgtaattaagtttagccttggattccaggcccaaagatttataaaatgttaggctttaaaccacaaaaccaaaaaatcaagccattcttgattcctctcaggagaaagaatgttttctaatcccatgaggaaatcccaatcagacatactcaaattggatcacactttacatttaaactaacaataagaacaacaatagaaataacaatcatcactaatccagatccagttgttctttaattgtaggccaaatcattctctgcagatcctgaagcttttcaaaaatgaagaccaatcctgaaggtgagctgaaaagtgttgtgagggttccttcactttaatctactgcatttttatgcagtgaaatcgggataatgtggaaatcaaggtcgcttttgatggaagagaggtgacaaaaagatatctagagggacagaaggaaagggaacaggagtaggatggccaagaacaggcctacttaatttgacttgctaatttcataaagagactctgagcagaattgcaggtggattatccacatacaatcctcaggcctttctctgcactttcctatgctacatggtctttccttcccacagggatctttctctggtattgtctatctccttagcaatgagagaatggaggctgttcaaatcacctgtcatgagactgtcaccctactctctaggtatggcttcacctaaaatacaattataaacatagaaacttccacctcacaagtatagtggtgatagcaaaactcagagcatagcaaagtgcattctagatgccaacatagaaattatgttcattcagtacattaaacagcatttgtttccaaagaactcaaacagaatgacaaagaaaccactaacacttcactagataagcaaatatagcactttcaatattatattaagagatgcttatcaagaacttgcaaatttccttaccctttgttctagcaatttgcatcagggaatctattctgcaaaaagcagcgactgcatttttttgcataaacgtgtgcattgcagaattatttagatggacagagctttagaaacaacctaaatatccaacaatagtaaaagagtaagtatattaagatatttacatacggaataggtggttgatttacaaagggctagtggaatagaaaaaatttctcatgttaagatccacatcaaaattttttttgtttacaatatgcacataaaagattaagttataaaatcaagatttaccaaagttgaaagcatacattttttcactctcttataagagcatatttgcatgttcctaaaagaatcaataaatatactcttataatccatacatgttgggtatttacgtgttaaaactgaaagtctaatcttgtgctgtctttgaaaaacggctgtgttgctgtggctaaagaatgctttacagaaaagaagcatggtatactaatgtgagaaaacgtgctttgtttttaaatgtgatggttttcttggtgacattttgaagtcaatcttttctctcttgaatgacagaatttctatattaagagagtatgtggagacaaatagtgcctctcagttgcgcaaagaagcatatttagtatccaactacagaattccacggaaattatagaatcttcagtccagatttaggtaccagagttaagtagaaatggttatagaaccagtcagtaagagtatagcatatacgcagaccgccacacagagagtgaggcatgtgcaagagaaaaaaagtaagagtgtaggaaacaaagagtgcaggaggaagaagagagcaaattggtaatgattctgtaaccagagaagcactggcatgagtgaataactcaactgtaaagaagtacagaatggatgatagatatcccaattaccctgacttaataattacacattctaatactcatatgaaaatatcccatggatccccaaaatatgtacaactatgatatatgaatacaaattaaaagtaagtacagaataagtcatatctatcatcacacatgcagtatctccctttttaaaaagttctcaataaaataccttaatcaaatgtggctcagtaatagtaacactgaatttagacaactttatcaattatcttatcactagaatggtgtacaagcgtgatagtctttgattgggcatgaccaggaaaaagttgagggttacaagactggtgaccctcaagagaggaggtaacatttgtcggccttacaattctcaatattgatgcatgctgtgaaagtgcaagacataagttattctcaatattgtgagaccatcaaatgttacctcctctcttgagggccaccagtcttgaggctctcttgagaacttccttccaatattagtccataggacctcctgacacattcacaagagaaacagagagcaagctgagtgacattatttttattctcttacttgagggaatatatgtaatttagaatggattagatagctctcctgcattgctttattgaagatatgtctggagtctgcagtcagaaattagtgaagtccttccttatccatctgaaaatttcaagtttctctaaaattaaaacaagaaatagaaatagtttaaccaacgcagagaccagacccaacacactaatgcaaatacccctttcctagactctactatggtcgattcacttttccttatggttcacttcatggcaaagctgtaattataatgcttagaaatgttgacctttacttaatgactgactctctcatgaccaagattaatgatttgaaagcccaaatgcagatgctaacaaaagataaaggtgtatctatcacttaatgcaatgaaattttattcattaaagaacaagaaacaaaggctgattatatcttccttcttataagctatttaaaaacaaacaaacaaacaaacaaacaaaatgatgtttcgctgtgttacgcaggctggacttaaactcctgggctcaagcaatccttctgcttcagcctcccaagtagctgggactaaaagtgcccaccaccattcccagcttataaactacttttaaatagcagtcattctggcttgttttcttgcatccagaaatgaattcgactggtggctcattgtttctttttccagagtaacatggtctcttttcctttggtccacacagatcctgtggatcaacttcatgtcagaaagcaaaaagtaaaaataacaccttggagagctctcactcatctattcgcaccaacctaatcacaatgctactgcttccaggatgaccaggtaatgagtgtggtctatccaacacgaggattctttccaaggcaatttggagcaaatcaactaggctaattggtaattcaagtttttatcccataaaatgactgtggcccaagggaatgtatcagaaacctgtgcacaagagtttgtattagagttgtttattaacatggggattatcttcaaaccaataataaaaagctataattgactctttgcaaatgcataaatatgggagcaacagtgtgcacaggttattactaaactggaaaagaattttaaacatttcttgtaataaataaatcacctttaatagtgacaaattgtagataaattgcataatgccaatgtatatttcaaggtaagaactaataatacatcaattcttttttgttcctttaagattagaactcataaaccccacagtgcactgggtacaaaatcccattgaaaactcagaaatgggactgatgggagaactgaactcagagacttccacaactcggaaatatgttcttaaaaagccatgtatctttttatcttgggcttctaggcaactagcacaggtcaagataactagcataaaaggaatcgggcactaattctgctaccatcttggtgtacgatctgacgcaagtcaatgaatcactatgcatctcaactcttagatctaaaagacagaataatcaagaattttataagactccaatgagacaatttataagaaaaagcattgaaaataatgcatgctgtgagagcgcaagacataagttattaaagggctgatatgtcaggaatatcagtaagtttcagaataaactgttacggtctattcttgatttggttaaggacatgagggtaaatatgcttatgctattccattttatggatagcagtggtgagaaccactgtggccaagaattttgtcaattaatctgcaaacttttctgaccaatgcttagcactatcaatctaactaagctgtgtgtgtgtgtgtgtgtgtgtgtgtgtgtgtgtgtgtgtgtgacttaatcaatacctaacaaagatccctggggtgaagatcactcctatattatacctagtaccaccagttatttggagggacaggtgttatccactgatcaaatcttaggaagctgcccctcggagaattacagctctggcacaagcagatcatagactcagtttacacttcaagaaactctatttagtggtgactgcacatagttcattttttaaaatctcgctgcacacagcctgatcctgtactactcaaacatgtcaattgttatgattcattattcttcaaaggcctcaagttggtactcaatattccactgggagcttggaaaacggatctgtcccttcactgagttattaggcaagtttcaacacatcttttcatcagtataagagtctacagaacctagcctctgtaaattcagagaaggggccttgtattttatggcacatggaaaggcgttagtcacacacaacttgttcccagtcataggcctctgttcaggctcctctcttctctaggttcccttagccttaccagcaaaatccctagacaaatcttatttcttctcagacccagacagagcctcagatcctgtatgaagactcctgcaatgaggggaaccatcttctccactggaatttgtacagctgttgtgaggctcctcttctctctcaatatcgccttttctactgccactcctttcttgttaaggtactagccactctaaccacaccttctctcattcctataaccaatcatttttaaaagtctggcagaatctctgatcccaacaccttcacagaaaaaaaaaagtaaaaacaaacaaagaaacaaacctgttatgcattataggagtgattttcaattgtgtgtatgtggggtgggtgtgtcttgatgggaacatgaaaactccgaggcagatgtggtaagcagatgggcggggcatgtgtaatgtgatgagtccttccagggtggccttatctaccttgcttatagccagcaccacaatctattcacattgtttgtgcctcagctcaggagcttcttattgctcactcaatacctcccaaatgattttctcacctacagtcttgttctctttaaccatgacccaaaccaaccaattaattctctaccttgcttgctgaatgacctgtgtaaatgcaggcctaattctgtcaagcccttcttaaatccttcagtgtctctctatcgccttgaaggctaagtcaaacttcccaacaaggttgagtaggctaccattcccgtttgggctttctagcccctttttgggtttattttattttttatatgcatttttttagagactgggtcttgctatattgtccagtgcagtggctattcacaggtgttatgatttggctgtgttcccacccaaatatcatcttgaattatacctcccataatcctcatgagtggtgggagggaccaggtgggaggtaattgaatcatgggggcgagtttttcctggccgttctcatgatagggaataagtctcatgagatgtgatggttttataaagggcagttcccctgcacacactctcttgcctgctgccatgtaagatgcgcctttgctcctcctttgtcttctgccatgattgtgaggcctcccagccatgtggaattgtgagttcattaagcctctttctctttataaattacccagacttgggtatttcttcatagcagtatgaaaacagactaatcaattttttgtgatggttaatattgagtgtcaacttgactggattgaaggatgtaaagtattgttcctgggtgtgtctgtgaggatgttgccaaaagagattaacatttgagtcagtggactgggaaaggcagactcaccctcaatctggaagggtaccatccagctaatcagctgccagcacagccaggataaaagcaggaagaggaacatgaaagaattagactggctgagtcttctggcctccatctttctcccatgctggatgcttcctgccctcaaacatcaaactccaaattcttcagcttttggactcttggacctacatcattggtttgccaagggctctcaggtcttcagccacagaatgaacgttgcactgttggcttccctgcttttgaggttttgggactcggactggcttccttgctcctcatcttgcagaaggcctattgagggagttcatcttgtgatcatgtgaatcaatactccttaataaactcatatatatatatatgtgtatacacacacacacacacacacacacacacacatctatcctattagtcctgtccatttagagaaccctaatacaacaggcatgatcatagcatgctacacagccttgaacttctggactcaagtgatcctcccatgtcagtctcttgagtagctgagactacaggctcatgccaccatgtccagctctaagaggtcatgtacttttttaaatttttttttcaacttttaatttttaattcaggggtcacatgtaaaggtttgttacttgggtatactttgtgatgctgaggtttagggtatgattgatcctgtcactcaggtagtaagcatagtgcccagtagataattttttcaactcttgccccattccctccctctccctctaatagtgccctgtgtctaccgttgtcatctttatgtccataggtacccaatgtttagcttccacttatgagtgggaacatacggtatttggttcactgttgctgcatttattcacttaggataatggcatccagctgtatcaatgttgctgcaaaaaacatgatttcattcattttcatggctgtgtagtaatccatgatatatatgcaccagattttctttaccaaagatactcttgatgggcacctaggttgcttccctgtctttgcaattgtgaatactgctgtgataaacatgccagttcatatgtctttttggtagaataatttattttcttttggatatatatcctttcctagcccagttttctaagtgtcagccagccctgcacgattacttgaagttctcaaagtggtgcaagcttcttgctttagagcatctatacagttgttgctcctggctgattcctgttgtcccttttataactaaataggctacttaccttttgttctttaagaccctcttcacgtatcacctcctcctccagggctctcttcatctctgaaggctttttaggagcctcccttcattttctttgaacattaatgataccacagtcctatctcaatctctcacacctgtctactctcccaagtttctgtaagaatcgactagttcctgtaattgacagctatatggtgttactattaattagtcccatttgattatatcatttcctgacagtcccaaacactctttggactgtggattttcaacatttgtatcagacagctggtcaggtctacctgctattttaccattgcttgcctgtaatttaatttatcttggcctcaattcctccatctgtaaaacaacaatgactattctactggtttatatggtgactaagtaagataatgcatatacaaaatacagcttaattaatgcctaatactagtaagagcttaattaatagtttctcttcttccccctccttcaaattattattattattattattatgctaggcacttaataaatacttgacacattgaattaattagctgagagctttttatatctaggaaccaaatttccacttctgctctccagccaacttgtggaaggtgaaaggaagatggtcagcatcaaaagattcctctttctagcacgtggcagagtattccacttttgccttgtaactgccattgaaggtgatatttcacctgataaagtcagttatgagatctcccatacagagtaatgaaaaagcctgtaacagctagtgatctgcctcccctgctgttgcctccaccgaataattttgccataaaaaataaaggggacatctccttttagtgaattatgacaaattttaactgacttatccctcttggaacttaggagtgtcctactttctcctccaatgacactcccactgagctgacatgtgacacatcctgggaatgcattagaactaaagagaaagttaagactgtgacacatccgttggccctttttttttttttgctaaaggaggaacatccctcctcccttgtctcctcagtccatagctctctgttctcaggatctttttaattctactggccgggaagacatttataggcaaaagcccctgtagagcaacatatccccctctctatcatatatacttctcaaatacctactacatgccagacactgtggctctggggacacactgatcagcaaacaaagcccctgcccttatatgattatagtggggcatgacataaagcaaatgtgttcctaaaaaattccaagttgaacaaatgacattcataccatactttgcgtatggtgcaaaccatatgtaccaataatacatgacatctaaggctgaattttaaaaataagtattcttgttagaggccagtcatcccttagcaactgactatttcagctctggctacagggaaggtgataatgagtaacacatattgaatacttaatatgtaccagatattctgctatctttttcaggtatttttacttgattatcacacatctaaattccccatgtggttatatgcttatcgttatacccattttgtagatgaggaaacagagcagttaaacaatttgctcagccatattgttagtaagtggccttgaaccctggcaatagagcacacgtgcacagacagagagattatgacacattgtctccaaaggtgcttcagaaaatcctaaggagggagtgaatgagtgaggatcatgaatgtgaaaatcaaatctacccacgcaacaaaggaccactaaattgccaaaatgctcaagagcatgatttactgtattcttcatttctgtgtaaataatgaaaataaatctctcggctcccaagaggagcacatctgtaatagttcctgctgaagatgttaaagatgtgtttatggaatttgcagaatcacttccttcaaagttcaatggtctataagttgctagtgttattgttgttaaaagaaactgaacgcttagtactttctgcttcaatctcaggttgagatttgtaaggaaaaccagatatcagaccagctcctatggaaactactctgtccaatcaaaagatatcctctttccatgaaactaacttaactacctcacaggatattcgaagcacaatacataatgtgaagggggaaaaccttactttccttctcctgttctagtacgctttaccagatgctcctgtggccaaaccctaattgttcacttcaaaacaaaaactacttaagcttctggaatgtaacacatctctaccaggttaaccattaagagacggagaggcagaggcagaggggaaacaggagctcctctcagacatcaggaagacaaatgcgaattgtccctacaaaagaaaaaagatcaccacctacgtgtttctctatcttctctcacttttctctgtttccttgtcatccctctttctgcccaggtaaagtggtggtggagaaggagaggaattccagctaaacagtgcgttggtatgaaccgtaggctagtgagccatgtgcatgctccagggacagggaaactgaagagagtgcactataggacaccaaatgcagatataatcaaggcttctttctacatgccgcaacatagtcaatttgaaaataagcatatccagaatggtaaagcacttgcgcagtaattcagccatgctccttctaagtatgaaaatctgaatatcaaagcacggtaaggagggaagcaggtgaaaaacaataataaaaacagtgagtcagcattttttgaagctatcagaagctcaacagagctgaatctattatgggataagaatggaaagatacaggtggaagaattgacatacagcagcaatatcttaaattaactccttgctattgaacacatgagaaactatagtgaaaagtctcagtgactgattggtttttatgcctagaagagaaagcaaattttgaaagtcctggccctttgcatttaggtccataattagacaattagagctcatgtactacaacaaagctctcaaacaatcatgaaacacagccacactcattttaaaagaagattcttaagagttaaagaagaccttttaaaaaatacattgctttcacatttcttccaagtagcatagaaatcagggaggaagaggaaaaggaggttttctatccatcagaggaacaggaatggattttggcatgcttggctaagcattctccccatgatttatggtctgaggtgtcacttacatggatgggatggggtgggagtggaaaaactgataacatgatctgataaacacctgtatcaaaagcacctgaattgcttgcaaaaatgtgtatttctcactgaattctgaaatactgaatctcagcagaaaactcaaagaatcttctaacaagctcctcagtgattggcaggagctttgagagaggcaagggctgagtaggtaggtggggaggtttgaggctgttgggcaaaacagggttgcatccctttccttagacaacaaacagggctgcaggatttaataaaattccacaatacttccagtgttaacaatggtgtatgctgggattaatcccacatgaaataatcacaaaatgataccagttagtatgatgcactgctatcctaccacagccgtgcaaattttaaggacagtcttttttggataaggtcccaccagtagataaactccacaaagtctggccaccagggagggtcaattaccaggactacattgtttctctagttcagatgtgcagaatataagggcagtgtgaagttcagcattacaaaaacagaaagcaatttagtaattagtgaaagtattacatggacaaaacaatagctgggagatttgtttaaaggaataaactaataactttgttcataccaacccatttcaaatatgggaaaataatttttaaacatttaaataaaactagaattaacgaaataccttggatacactggctagacaaaagattcctggtcctgactaacttgagaatttcggcaaataagtcagttaattacaaggagccccgtatgctgaatgcagttgcccaggaaatttgcttaggtcttgcttagtcaaatttgagagacagctcaactaccatacccatggggaaaattgtggacattcttggagtatatgccttaaataccatagttgaaaatgccttaggttgtgcagtggtagatgttttttaatgtactaatttaattgatttatacaataatatatctttattattgcacttagcaccttatattgcaattaataagttgtatattttctcccccttattgtctataaggtataaatttgactacaattgaattcattaattttaaaatctaaaaatgcccagtattttgtgtgatattatatatatcttttgtaaatgcttaccaaatcaatccgtccttctagatttttatttggtgaaaggaacttgtatcagacagtgaacactaatgtagtgaatcctagatttccgacagtgtgctaagggactgaggatgcaaatatgaatagaaaacagttcctgtccttgagaaggtcatagtcaagttgacctggaaatctctgtaagtattataatgcaatggtaaatacatttgctaaacaatagttctttaaagtacctaatttgctgaatacattcatatttccacatgttgagtttgttcaaattcacctaggcaatttatgttaccaatgcattttaatcctgggttatatagctaataaaaataaggacattattaattattttttaaattacattttaatatttaagtaatcctaattaagggcattaaacatgtaattaatgtttgtttcattataaacttgtctaagcatatagctgtacgctaaaaacaaatacaaattcagatttaccactgtgaatgctaaactttatcaaatagtacaactctggccgataatttatcatattctgcatttgttgatataaagacaaactgcaaaaacactaagtgtatttctaattataaataggatttctactcaggcctagggacagtgagtttttataaatgtgcaaccaaccccttttcccatgagtctgactgcagttctttctccatggctgataccaaggaagaaatgttgagactactctttgggattctctgcagtgtatttgctaaccatgtggaagaagtatgtgggatattttaatgaaaagggcagtaaagttagggataaagagacacaccttggtcaaaccaggtaataactaatatgactttagaaaagaaagcaacttgctctattgtgcaggctggagcgcagtggcatgatcacgactcactggagcctccatcacctgagctctagccatctttaaacctcaacctcctgagtagctaggactacaggtgtgcaccctgatgatttttttttttttaattttagtagagatgaggtctcactatgttgcagaggctggtcctgaactcctgagctcaagtgatctgcccatgtcggcctcccaaagcgctgggattataggctaattagggtttctatttcttttcttacaaaaggaaaacatttgactaggaagtctctcaagtcatttcttgctttaagtctatgattcagtggtcagcagtaatctcagagaagatgctatgtggaagggatagctggttgcagctgggtcaccgaaaatcaccacgaagttcatacccttagtaaaattattttacatattgatagctcacaactccctcaacctcacactctacatccactccccccatcaatttccatacatgcttttgggttatggagtatcagcaggcagtgacaaccaccacgaacaacaacaacaacaacaacacacacacacacacacacatacacacacacactctgaacttgaaaacgaaaacttcttgggattttcagggcatggtctcagctacccagcttcctgggaaataaagaaagtagcaagtgttaacacctcatttttacctatcaacagttacagaaaaacatgtaaattgttccttatacatcaatgtatgagtttttgacaatgctgggggataaagctattatttctgggttctgcttaagacacgctcctttgtcctccctaccactcagatatctatagttcatacagtaccaaaaacacctctttccacctagagggctcttaaaacctgcagttaagcaagagcaagccaaaacaagtctatagcatcacagatgggttatccaactcaatcacagacattcccctaatctccagcaaagaaacctgctgtctctctaatgcactaacatcatttccctagggcaaggtctgatttctctgagtatattattcatagaaatattatacattttgataaatgtaaatagaggataaactcagtcaaaaacaattcacaggttagaggaggtttaaaagagatgggagcgagaaatcactttttcctgtatttgttttcccaaggtttctcacccctctgcagaatgagattctaggtttagagacattaggaaaccagtaaccacgggacccgttgcctggaaacggcctgattacaacgaactcactaggctacaaggaaattctacctgatcctttaggaccatttgccaagcctcattatgatgataaagaaaatttatactttcataaagccttcaaaaattattgccatgaggttctgaaaaatctgagcatctgctttggggaagaaatgggaaattaacatgaccatctagtgtcaaaaactgacagcctagacaaaataaagaaaaattcgttcagcatcaggcgtagaattcagaaatcaaaaatccaaattcaatgctgaacaaataatgtttgggaattgtactgtctgccatgggggtgagaagccaaggcagccggaaaatcactaataaggggcatttgtattctgcagcagtagaacttcacttgtgcttccctgtacatctaagaagaactttcaatccaatgctgccattaacagctgctttgaaacatacgccatttggttttgttgcccttgacaggtgaacaagatttgtcagggaaataacattataataatattgcagaagtttaacaaattctaagaatgtctataaatgtttaagacaattagtaatcactctgagaaaacagagtctattttacactttagtgaaagaaatttttatagctaaatgactgtaggtatatatatttgtgtgtatatttgtacacgtacataattttatattttatatatatatatatgatagatgatagatagattttttcccctttcaagaacaacaggagttaccaaatgcatcagtgaattctggctccattaaaagttttcgttgttgttgttaatgatctacttacagttacattggactaaggtgcgtctcacagggagctcaaatgtgactttggacccatcttaatatggactttgccattaattaggtctatgattaatttttagatcatttatcataatttgctggagcataaaatgcaaatttcagtgaaatctaaccataattgcttacaattaaattttttatatctattgtaggaaataaattcagcatattcttttaaattttttattactatttttcaaacacttttttgaggcatgattcatgagtccattcttcatagataaatgctcaacattccagggccacagggattaatagagactggtagagagagagtaaagtaattagcttaaattttgccatagatgctatgggaagcaagccattttcactttaaagggactatttttccatacttcagatattcaatacatatccacagtactctcaaatatgattccagggtaaaatgtaaggcctctaagccctaggtttcaaggaatgtatcttaattacgtttgaaccctcagtacttatttcaggcctagcacacagtggatactcccaaatctctgctgaactgaaccaggccatagtatcatcagaggaagtgatattctactttagagctaactgagacagacagggaaataaaaaacggactgcagattgtactgaagagagtgcctggaaggatgatggtcatagattacatggagaaacaactaatgtcagaacaagaaatcttatgatcatcatttgacctctaccacccattccccatgccagtcactctatatattaccgtcaggattattctcccaaaacgcaaaatcataacactattcaactgcttgagaacttacaataaaaaaaaataaattattcattgcaattatctttgtcttcaagcaacttaacaatttggttgcctagatagaaataacacatgatactttttataaaataggaattgagagaaaagtcaggacagtgtgagctaaactgtcagtagaagctgcctaatgaaggagggactggaaccaggtctatttatttgaaagaataaatagtagaggaggaccattccaggacaggtaagaaacaagcaaaaacacagaggtgagaatttgaatagtacattagaatagatacaaagatacatttggagatgggttgcgggtaagaataccagttttggctggaatcttggaagtctgaggcattttccgtgaaggaagtatttaaaaggatgctacgagtttccaggaatattcatgaagtgctactggtgaaatagatagcatttgtgatgaacctagggacacactgattcattcatttggtaagtgtttttggaacacctgctatgtcctaaccactagagataaagcagtagacagaattcctgccctaataaaacttatcaggggtgagagtacacaaatgataacaaaacagataagttagtatataataaaaggtcaagtgccatagcaggtaagggtctaaagaatgggagaatgtattctaaaatattaaaactttaccgtctcccaaaatatctagtacagacatgggcatgcaatagaaataccaggtgactggagtactgcctgctgaatacaagtcctggggttatgggatacagattttctcctaataaaacctgaaacaatcaatcagaactctatgaggtctccgatgtgcttgcctaacacataaaaatgcctgggcgcaacccaacctcacctaaaatgggaggatatctgggataggctcctgcagcatacaaagttggatatattgcagggttttcgaaattctttccacattatctaggatgagctgctgataataaacaaaaagttttcattaaatatttgttagataatatgcctatgactgctaggtgctataaagattaaaataataaaagatggtcatggcattgcctttcttaaaaaaaaatcaaacataaaagtaaacttaaaagtcaggaaaagataagtacagtaatgacatcaaaatgagcttggttttacaaaaaaaaaattgtacaaaggagttcaggagctcctgtgatatatgaaacttgaaaaaaggaaggccacttatataaatgcttgtgttttcttgagtctttgagatatttaaattctatgggagcaagcattatgaatgtgattttcaaattacaacacctaatttgttctgacccatccttggtcactggttgaattttttatatctcaaatgccatcctcaaatatgggccaatgtccacacagaggtaactttccatgtaaaaaattggcaggaacaagtgagaaagggaggtgcttacactgccctttctgtaggacgtatttgcactgactgagttaatgtttatgggctgtagatattcattgagacatagtatggggtggctaaactcaatgccctacaaagagaaacaaaaggaggagcctcgtccatcatattgccaataaagagcagtaaaattacttgacaatataaagataatactttgctttcccactgtgcttggttcttgctaaaatgttattaatgaaaggaactattagatcccagtaacaagctgtcatacaactactttacctacctaatttcctttcccactcacccataatatttcctgtttctatacagcagtcatttggactctacaatatttcaatctgtctcatctccattattggtagcactactccccaatccacactcctgctctgtgcaaaactcctgtctcctcattaattctatttattcaactccttcaacctttgtccagagggtctcttttcagatcagacattctgttttgtttgttaatttatagcttttgacatttattattatcttccaatgagacacagaaagaatataagaagttaaatgttttcacaagcaaccctagattcctgtgtccctttgcgggggaggaaaatagaaagaaataaaagctgccagatagaaggcctgaaataaatgacctgcaccacccataggcaaattctacctctttgtaaagaatgtttcataggagggaatcaataagagctgaatatgaaacattggtgcagtgcactagctaagttcagtgaactcccaagctaatcctgtgttctcagaagctataagcgccaatctcttcacctttgctcagggggatgagctcaccacagaaactggcctgttttttgacctcaaaatccagttgggacagggttgggggatggcagaagcaatgaaagggaaggtttccaggccatttgttctaaactgaggtgtgctggcagaagcgaaggacaaggttgagtctccatggccctgagctgggtcacacagctggaatcacactttgctcaacacaaacgtctttcactttttcattcacccacaagcaacacaaggactgcaacagaacactgatgagaagaaacaggcccagcgccactggtcactgtcagtatctaggctacctagtaaagcaacccccacacgacccggatgctaaataaacgtttacatcagctcatgtttccctatgactagctgatcagtatatcgaattgaaatataataaacaccaaaaggaatgctggcaggaggctcagtattttcagtttttgtacaggttttttgaaaatcacatcacatttgttccctttaatgatactgttgtcttacagaaaaatactcattcacgtattaaaatttcatcaccatatctaaagcgacattcctttttaaaacaacaacaacaaaaactaaaccaaacttactaaaaagccccaaatgtctacactgaagcaactcaaatgaaatggtctaatcataaaattaaacacattacagatgagttgatttgagggcatttagtacatttgagtatactcgatatttcagtttctttaacctacattccctaaaagtaacactaaacagtggttctgtgtatatgacacagtaaaaatgcatatatttatttctgaggctgtatattagctgattgtgaatcacccttgaaagtatgttttataaaataatgttcatgcaaattctactaaatgtatggtatactttatacaaatattaaatatgaagggaactggtatataaataatcaattgactagactatgcatttaatatgtatttcatgacataatattagcttttataggaatcactacttgaaaaagcagaccattaaactgaatttgagtttcaatgactcaagttctagttccttttaaatgtgtctggacaatctggttgtatcacttgcttctcatccataaattttttcttaccatttatgaaatgcttgttatgataaaaattattataccacatatacatttctattcccatcccaatcaccaatcgaatttctaaactatatccctatgatctaaaataaaccaattaaacaataacaaacaaaactttatgcatctacttattcatactgattacatatattatttttcttgccttgtctttaccactagtatattaattcttaagcccaagaactttgcattcctactgctctactccatcctttgctttaagcacaaattagaaagaatgtaaaccaacactataatttgtctcatgatagctccaagatggtctgatttactgtgtggtaagaatatctcctatcctgcatttcaatctccatccaggccttcaaataatactgtctatcagttaatatacagcattcccagttgaatatgattctctaacagtagcagacagaattgttctctcggtatcctgtggggcctaagaggacagtcaaaatctcagcaacactgtattttccttgcttctgtgccattctaacaatttcttcccctgggaaagcctcatcttttccttagatttgtgtttctggactcactgatgaatttagattctattcaaatgtgctcgcactgctatgttctattatgatctggaaaataactattattgttagcaagcaaatgttagagtttttattccactaacacatgctttgagaatccctaagttcctgtttatgactttgcagataacaaacaaaactataaagagtgtaactacttattgggcctttaaagacacgagagataatttattagaggacacgctcagtgttctgtccaggtggttgctatcaattacaaacagaagtcttcccaaatattcacttaatgaataaattgaaaggaagatcaaaatgtttttcatccacagaaagacctttgccacagcattgatatgctggtacttttgtcttaacattttggtctcttataatctcttgtttaaaagtcaacttttttatgtaaatgtctctcagtttatccagggtgattcttttctgttggaatgagaagcattatctctaagcatgcatttatgtgttgtttaattgggtgtggtgtggttgttggctctgtgataagaaagcgtcacagtctccgacctctagatgcttaaaatctaagatgaagtaaatatcccaatatattactgtggacccaaagcataatgggccatttaaaatcattctatgaacaaatcgactgtcattttgacagtactgagaacaacatatatcccttcacatttcagcttgtgttggatcattaggcacaagtttgaacaattccagggaaaacttacaaacacattttgaaataaaatttggatgtaaaatatcaagacttaacagaaacattttacagaatgatttacttcacaaaattatgtggtccgtacttctttcaaataacatattttctgctggatttaagtaagcttaattgacatgttatcatttatatagaaaattaacatgtccctgatttgtcaggtacaacaagaatgtacaaaggaagggccacatatactgcaggaattttaagctattctcttatcttttatttcagagcattcataatttttaaatgttgcaataaccttttgaggcaatactggtgacttcttcatttgactaaaacatccttgcatatcaacaattgaacaattgaaacactttaacaaaatctaatgtgtatatatataatattatatgtattatatatgaaaagtatgcatgtcataccatacatatagtgagatatatatatatatatacacatacacacacacacacacacacacatacatacttatgccatcagagaacatttcatttagattagtatgaaaattcaaaaaggagttaagtctcatttttatggagctacacccacaaatcccccaggctacacttagttaaaactctgaaagaaattttattctgagattgagctcctgccacatcacactgtcaatatccaatattctgaagctacaagggccagtgcccaccgatcctagtcccatttaaggaaatgcaatgcaatctaatgccagttctcaaagcacgtaagtacatgctgaaatcaaagatttaagtgaccatttattttgtcttgtatctgcctgagaaaaccctttgccagccaattttctcctattagaattagctttcaaagttagaatgtcatttgcatgcttgcagacaaagctaacaatttcaaatcatgaaaatgtgtattctcagatggtgaatatttgcttttttaagtacagagagtagaaaccgagctagtcttactagattttatatattgcttaaattaacggccaaaaaaagcctccaaggggtaaattgcctttttgtaatattacctttaatttcttttagcaaatgggatatgaggtttaagtgggttgaagaaaatcaagtaaaatatttatggtatacaattttctatggtcatatgcctaaaagcaaacattttgtggttagtttactatgaatgtaccagggctagcaagggagtcttttgcaagacagttgatttttagaaacgcttacaggttgaaactacaagctcctaataacatttaacaatcagaattgctttggagaccagcctatgttggctaacgctggctacttaggctctgcaaagtttttgtaactattttggcaaccaagtaccataaaaccaagcattccattttacatccaatgtgtctgtgctggcattaagtaataccaggagagtattttaaaggttcaaggtcaaatacttgatattccattgagtaaaatataaaagaaaatactgcacatcatctaaatatcctaaaaggctaagttctaaccagtataagtccacaagggacagaaaagtagcatgatgaaataaaaaagaacactggactgagaattaggccttgggcaaatcaaatccattctgagtctagcttctccacttcttcaaagagggtaataatactggcttcactgacctctttggataaaagcctgcatgtagaaatgcttaaaaatgtagacaatttaatacaaatattagataatactatcatttccatttctcctgataatcatgcagcaggtctctgaacaagacctgtgtactgtgttattcataacataacttgagaagaggtggtagtttttacacacctcctcccccccttttttctttacacttgatcagcttcagagatacagtcagttactaaactcctcagacacttttagcagcatcagaagcagctgccacttgcaaacctgtcagattccacagggactaaggatgtaaaaacaatgagtcattacaggtgtgtctgcctttttcattaaaagacaaaatgaaaagaagatgaaattcacccaactcagtgtttttaaggcagaaagtaaagagatcaaccaggaaatactttattcctttaattcatatgacagacattcaaatataacatagtaattgtttttaaatagactgttactgtgctgggtgctcccccagactacgaaaaagagtgctatctaacttcaaggaacacactgttcgagaataacaatatggggcataatggtagcatacaattaattctaattccaggtagaaccttggtgagacaagaggtagtaagaaggccactggaatgaacaaaaggaaggtggcaggatccttaaaaggtttaatgaaagagacagagatgacatttgagataattttgaatgattcctgggatcctggtaggagaaatatcaatgaagacagaaactagaaagagggatatgttcaaaattgagaagtctaagttgtttcaagaatatcctgctacagtttccctgtctacccaaatgtgcatatgtttgtgcaagctgctgatgttcgtttgttacaaaggtgacatgaataacctaaatttataaaacatctttaaaactggcaaataatacagaatctctatggattacaaataaaacatttactatacatgtaatcatgttttagaaattaaaaataaattaaaatatgcaaaacaaagattacatataatcccaccacccagggctattttgatttatgccttgccaagactatgtctctgtacctatatacatctacattttttttcttcttcttttaattatactttaagttctgggatacatgtgcagaacatgcaggtgtgttacctaggcatacttgtgccacagtggtttgctgcacccattaccctgtcatctatattaggtatttctcctaatggtatccctcccctagcacccctcaccctgacaggttctagtgtgtgatgttcccctccctgtgtccatgtgttctcactgtgcaactcccacttatgagaacatgaagtgtctggttttctgttcatgtgttagtttgctgagaatgatggtttttcagtttaatccatgtccctgcaaaatacatgaactcatcttttttatggctgcatagtattccatggtatatatgtgccacattttctttatccagtctaccactgatgggcatttgggttggttacaagtctttgccattgtgaacagtgcagcaataaaaatatgtgtggcagggcgtggtggctcacgcctgtaatcctagcactttgggaggccaaggcgggtggatcaccaggtcaggagaccgagaccatcctggttaacatggtgaaaccccatctctactaaaaatacaaaaaattagctgggcgtggtggcgggtgcctgtagtcccagctacttgggaggctgaggcaggagaatggcgtgaacctgggaggtggagcttgcagtgagctgagatcgcgccactgcactccagcctgggtgacagagccggactccgtcgcaaaaataaaataaaataaaataaaacaaaacaaaataaaataaaataaaataaaataaacatgtgtgcatatgtctttacagtagaatgatttataaacccttgggtatatacccagtaatgggattgctggatcaaatggtatttctgattctagatccctgaggaaccaccacactgtcttccacaatgtttaaaataatttacactcccaccaacagtgtaaaagtgttcctatttctccacatcctctccagcatctgttgtttcctgactttttaatgatctccattctaactggcgtgagatggtatctcattgtggttttgatttgtatttctctaatgaccagcgatgattagctttttttcatatgtttgttggccatataaatgtcttcttttgataagtgtccgtttatatcctacacccacttttcttgtaaatttgtttaagttccttgtagattctaggtattagccctttgtcagatggatagacggcaaaaattttctcctttctatacagattgctttgtaatgtggttttttcacttactagtatgtttgaataacttttcatgacattaaatatacaaaatacaacataaaatttacaatataattttaatggttccctgatgtactattgtatatgttgcccatcagtttattttatgagtctatattatttcttatccagtttacctttattttcttgtataaacaataatggcatggtcatccttttaaattaatcattatttcagctctgaatatttatttaattctaggattccagttactgggctcttctaaactgtcttccaaagagttatactgattttcattcttcactaatgggttagccttggtctactcatgttctttttaatgttgaatatttaagttctaatttttcttactactaatatttgaaaatatttttctttgaatattaattatgttgaacatttaaaaatttgtttattaaccacttttttatatgatatgaaatgactaatctccattaaaatgttacaagtctgttttgtgtgttttgttcatctttgcttttccggtaaccatcctctgggtatctttctcttaattaattgtaacctcctatgcatactacactaggacacattcttaggtttaggtgtttatccacacttagtgccatagactataaagggtctgagattttatactacttaaaaggtaacaagttaacctgctgcagttttatgaatgctagcacaaaattccagaatcctaggccagagatgaagttcattacttgtagcaaaagcagcagccagagtatcagcaattttttgtgctggttccataaacctcattttcctcaaggaaatgcaaagacagccatttggtaactgcacttacactgggttgtgttataagagaactctgagctcagagaacccaaatattttataatgggcagtaaatctgactgccctttgcttcagagagaaacattatatttattatactgaagaatatatgcatggagggaaaccctatatctgtgttccaaggccattcaggatacaaacattccttgaaatgaaagtctggggaaaaaaaaaaaaggacgtcaatgtcttgccaggcaaacatgcagaaatgcaaatgacacataggaaattatctccaagcgcttagccctgaacatgtagaagagaataaaagattttgtgaaggaaggaaggagagtgattcaaaggcattcagcactcaaacttggttccaaacttagccttacctgtgaaacctcacgacaacagtaacacaccagccaaataaaaacgtagcttctggtcaagctgatttctaaaaaccagactttctaaagaggttatataaatagtgacttttcactttataaagcaattctctacagaatctttaaatatcaagttattctggtatgattggaaagtaaattcatctaaaaatatttatgcctttttattcagcatattagttaatagagtatgctcaggatgaaactgcctcaattcggatctggctctgtgtgctggttgagttattcagcatgcttcagttccctctgctgtaaactggggatactgatggctattaactccatcctcacagaactagtaaaaggtgcttttgtcactgcatgatacataggaaacattcaacaaatgttagttgttattaattgtattactatcaccgaaaaataagtcattcagttgatatattttcttctgctcttttcctctatgtttacaattaactacaaaatgttttcttttcttgaatgacagggtagatgctaaacaaaagatttaccaaaatctaactctaataataaatgggttaaggtttcactcaaattataggttatttccaaaattaggagaagggaaaatatttttttaaaaaaaggatgatacactttgggaggccgaggaaggcggatcacttgaggtcaggagtttgagaccatcctggccaacctggtgaaatcccatctctactaaaaatacaaaaaattagccaggtgtggtggctcatgcttgtagtcccagctactcgggaggctgaggcaggagaatcacttgaacctgggaaaaggggttgcagtgagccgagatcatgccactgcactccagcctgggtgacacaacgagactctgtctcaaacaaacaaacaaacaaacagcaaaagaaaaggatgatgaattcctaaagctggattgtagcacctgcgataacttctttatttctatacttttgtatagtgtgctaacaaagaacccaaaaataagaaaaaagaaaaaagttgtataacatttaaaggtctgtaacatactattcacttaacacaaacaacctatgaagctcagggatagagtattcaaatatttgtggggggcagcagagggctgcatggcattcctctccagaatgtaatcattatttctgggttatggctggttctaaacctaacagtagtgactcatccttttccagagattctgaagtagatggaaaatgcatacttgaagaaaaggtggtgaacaaagagagagaaagactaataaatggtggctctattgcaaaggcaaagctgttgaacaaagtgggggaaatgagagaactctgtgcaaactaactcatagcattttttaaagcttcattatgtttctgagacttgcgctctgataatgtgtaaagaaccattttttcccctttcaccaccgccccattctgttatctgttacgtctatttcatatttgagacagatgaattttggaaaagttatgtaatttggtcaagatcatgcatgtagtaaacaatacatttaggattgaattctagtttaaaaaatcagtttttgtgttattttcactgtagtaatatagcatcagctgaacttgaattccagccaagtgcttgttctcctaaagcctacatcgcaatctactgaaataattcttggccaacccaagcatcaaataaagaataacctcaccttctggtgctcagccagcatggggattctgttaaattgtgggtgtagctgatattcttggttacctggggatccttctgctaattttggaacatatttggcttttcttaagctctcggtctgtgactttttaaactattcagctgtatcctggctatgtccatgtcctcagagaataaaacaaaatcatagatcagggtattctttttattttgtcctggacactctcattccccagataaatcacaggcacagtcataaatctatggaaaagaacagtacaatttccactggaaaggcattctctatcttttccacattgtatccactattcacagtgaattgctactaagaacatttttctctctagtactctagctacataaaacacttggtaatatacatactagtttattgttcttcacaggcaaacatagtgctacttttccaagtgtgggaataactcattctgaaccactggtcccccaaaggcatatccatatcccttaccttggctttgacaggaattataggagtaatgtaactattatttggtaagaaagctgatagtaaaccgtgtcttctccttattcctgaccctgcgcttatactttgcctagcctcatatttaaagaataccttccacttttctcaaagctacaagtaacaaatattcaacacttcacagagtcaggtccagcaatcttctgctgaggtctaaaaccttgcaaaattctggaaaatggtatccaggtaatattgtggttttgttagttaaaagtatatctgagtatatgtgtgaatgtgtatgggtgggtatgtatgtgtgagacagattggaagtttcttcaataaatatattactttgagtaatatcaggaattgtgctaggcactagggttataaaatatatcataaatgaatcgagtccttaaggaactttgcttgttacacttttatcaaagggtcagatggagaaaaaatgcttttactatgccatcctgagtactcggatataaatgtgcacagggtcctgtgggagcagagagaagggtgatttggtttccagggacaagttgtcttgaaggagatggcagtagaagcaatgaatgcataggagtgaccctggagaagaagaatgtggaggatgttgcaggtagaggaaaagaaaagcatgaaaaaacatggtgagtatgaaaaaacatgaaaattcattattattaattaaagtttgggaagggagtggtagagttaaggctcgacagatattatgatgaagacattatgtaagaccatatggacataatcggaagcttaaaatttaacctgtaggtaatgaggaatcatcaaaaggctttatggctaagtgtggcaaaacagtttgccattgaggcaagctggtcaaggatgaaatggggttaagatcctaggcagggaacaaattagggagctaatgaaagagacagtttccagaagatatgatgaggacctggacaagggtgatggtaatagtgaggacaggaagatccatagtgggggcactgtatacacaatgagatcctctctccaggggcgtctgaaagggatatccatgtgagggttatagatacgaattggaataaactgtatcctccccaaaactcacttattgaagccctaactcccaatgtgactgtttttggagactgggactttaaagttgtaattagagttaaatgaggttataattatgacaccctaatcccacagaatgtgcctttccaagaagaggaagagacactggagctttctctctctgaggacatacagagaaaagaccatgtgaggacacagtgagaaggtggacatcagtaagccaggaaaagcggcctagccagaaactgaccatgctggtacctcgatcgtggattccaccctctagaactctgagaaaatacactttttttttttttttttttttttgagacggagtctcattctgtcgcccccgctggagtgcagtggcacaatctcagctcactgcaagctccgtctcccaagttcacgccattctcctgcctcagcctcccgagtagctgggactacaggcacctgccaccacgcctgggtaattttttgtattttcagtagagacggggtttcaccctgttagccagaatggtcttgattccctgacctcatggtccgcccgccttggcctcccaaagtgctgggattacaggcatgagccaccgtgcccagccccacacttctgtattttaagccactcagttggtgatactttgttatggcagacccggctgactaatacagagggttttgttgatagaagtaaaccctaaaaaacacataaagagaagcaaaagcactgagagaaagtctgaagaagcagaaagccaggagcagacaggtgagtagagcaggagcttctgcttggtagttttgcaggatgaagcagaagtcacgtgggttccctgtagaagggagttctaaagcatgtaatgatggatttctgtttctgaggaggctattctagagttgtgattggatcagccaaactgttgtccaactactattatatcctgaatctattttcattcctgaagtctgtgtggtagccaagtttgtttcttgtttgccttgcttgccaatgtggtataacagccacgcccccaccctcctctggcatcaactggaataggccttttcacttgcactctaaaactgccaaacatcaagagtgggaggaagagatgtcaggatgagcagaatgcaaataatgactgcagactccagaaatcttgggatgagatgttaactatccaagattttatttaaaaaatatgaactgtaatacatatataaaatatgaatattttagccatccacattataataccagaaaacctcttgtgcacataatgagggccatctatgtacgacaggaagtgtggcatgatgccgtctctaaatgaagaggggctctttttaaaaaggcaccaaaaaatctgtttttattcctctttatagcaaattggcttagtttaaatgccagtctataaaaggcttcatccacactctcagtacctaccagttgtgaagaaaagaatgaaggaaaccactgcgtgcactttttttctcagcacctgccaacacagggcttgggttttcggacggaatttcataaatggaacaaatgaagactaatgatcctttctttatctctaagccattatagcgccatcaagtggaagacaagattataggatttagacagtccttgcagaggaactggtaagtagattattcttctacctgcttaaggatagtttcaattttgatccgagacacatctgtgtgtgtctgtgtgtgacacagagagaaaccgtgtggcagttcctcccttttgtcttctacattaatgcattccacctgtgcttttaacatccagatgctatcatattttaattatactgattaatgcccgcataagaattacaaatggtaaaccaaccttccctcaaattagcttagtcaatctgtttaaaggcagcacagtgaaatagaacaccaagctaataacatataaaaaaatggaaaattcttcatttgtttctgtttgagttcttttaattaaaggtgacaaaacagccctttactatcagtgcagcaaatgcaatatgcaaagatgaatgcatttacagctgtagcttgcattgctgttttagcattactaacactgttgggaaaacatctgtgaaaaataagatgacagggaattctcatgataaaactggaaagagatgtcaaaagaaatattgccatctccatctttggagagcttcgtgaagaggatcattgtgtgctctagttgctctgaccggagattccaactctaccctgaaatatcttacagcatctttaaatatctctctgatgggtctctggcaaaacaaaacaaaacaagaaaacaggcagggcgctgtggctcatgcctgtaatcccaacactttgggaggccgaggtgagtggatcacctgatgtcaggagttcgagaccagccttgactatgtggtgaaacccccatctctactaaaaatacaataaattagccaagcatgttggcgggcgcctgtaatcccagctattcgggatggtgggacaggagaatcgcttgaacccaggaggtagaggttgcagtgagccgagatcacaccattgaagcctgggcaacaagaccgaaactccatctaaaaaaagacaaaaaacaaaacaaaacaacaacaacaacaacaacaacaaaaacaagaaaacagaaaatcctttaacctaagttaccaagtaatttaaggtgaaataattttctccttggccacttcttgaagaaaagaaatatgaaacatgtattaaaaaaaaaaaaaaatcagggctttataacaaccctgaaaagaccaggaaccatgagttagttgtttttcctgagtaaggacattgtgcagccgagaggtaaggactgcttttggcactggtgacctgccctgaggctttttcagtccatgattgccaattcttccatctaaaaatggagatctcaccacttctcagcatgtcataaggattaaatggcataatataaatgaaagcatcttgaaaatttttgtatattgacctattgtgagtctgcagagataaatatcccaaaatatttttgtgctccaaaatatgagaaggtaaatacggctttacaattccagttttctatcttgcctgctttattatcttcccctcgccaccttttttttttttgagacttgctctgtcgcccaggctggagtgtagtggcgcgatcttggctcactgtgagctccgcctcctgggttcacgccattctcctgcttctgcctcctgagcagctgggactacaggcacccgccaccatgcctggttaattttttttgtatttttagtagagatggggtttcaccatgttagccaagatggtctcaatctcctgacctcgtgatccgccgcctcggcctcctaaagtgctgggattacaggcatgagccaccgcgcccggcctccccactggttttaagcactttaccaagagctttctgttgagactgcatcaatgtcatgtaacaattccacacaaaacttgtttccatgagtctgacgcttctggacaaggacaaggtcatcagttttgggtgataacttctgtaatatcataagactattgtttctaaggtacctactagtggcaaatgtgtgcatgtgcgtgtgagagagagagacagagagagagagagagaaagagagagacagaaaccctttcgagaaggcctccttaaatcagggataaggttatttctgagaataagataaaaacctaaagataccagtgatggcaagcttaactgtgtgcctaatatgcaccagaactaaaccttagaaaacaaaactgaataaagcatatccctacctataaggagattacaatgtcaaagggtaaaatggataattaaacacagtaattatcacataagcactatgataagggtaaccgaggcattgagtgatcatggaaggtttctcaataaaggtgctacctcgtgtaactccttgatggatgacagggagatggaaaaacatgaggagtaggacagtaagaatgcaaggagcaggaaatggattgggggagaaaagggagaccaggaaaagggatggctaatgtaaggcccgtaggtccaaacaaaccaaaacaaaggcatattaaggaatttcatatattccagaatggccaaggattttaagtgtaattttacattgtgtatacattttcatatttctactatatgcatatagacagctacatctttatatacctactgcttggacccaaaacctgattcatggctgtcagttcttccacatataggcaacaagaaaagggcaaatacaacatgcctgcaatgctcaaacggcttccttctgttaaatgcaatcatgaaatgatacggcttaacataaactcattgaagcttcatctttcaagcacaatgtaaagattctagctctattcaatctcagctacagggcaatcacaactgtaactaactcctacgtctttcatcttttgacaatgaaattaaaatattgcttcatgctatagtaggaaagaacactctaaaataaataatcccaaagttgaaataaaactgaaaataacagcagtgtctttctgagacagtggggcagcaatgttaatgaacggaagctttgctacaaactgaacaaacacgcattgattttgaaggtatacggaaagacgactcagataagctatagacatcagaaatttaagaatcaaagccaaaatgagacaatttagacaaggggcataactatttttttttaaaggtgggggatatgcagagaaagtaaagatgaaagttagcattcacttgagatactcaattacagaaaagtcatggaaatcaaacatgcaagatgtttaatgcacagagtgagatgaagaaggatcatttttaaaccttaaattctccctgctcttagtttggataaagaggaattcctcaagtcctacgttttcaaaattatgtctcttaaagaattagtagctttgcaaatcaaagcaggattggctcttatcatctcagtttatctctgtcagtgctcctggtggtggtgacatgctggcctctcatatttctgtaagcctggccctttggattttcccacagtatcagcctaaaaggccaaggagttgtaaacctgcttttaactctccttattccctcccaccacacacacacacacacacacacacacaaacagggtctacctgtcccatggcttccgaattatgaaatgtgccccattcagttcttgcaactcttcccacttatccactctgttcatcctctctggggaatccaatcttgacccaaagagaccaagtaatctttaaaatcagaaactgctttaataactcattagagatagatgaccatctcttatatcacttgagtctttcctttcctcaggcatttctagattttgggtcaccaaaacaacccaacagccatccactcactcctctctacataaacataaataaaatcaaaaccaaaaataaaagcagccaggtgtggtggcaggtacctgtaaccccagctactcaggaggctgaggcaggagaattgcttgaacctgggagagagaggttgcagagatattatttctagagattactatattatcctctgagaaaacacacctgcttgtcctttggaagcaaaaccatagtgtaaaatgcaggttgagtattccttatctgaaattcttgggataagaagtgtttcaaatttttggtttttttggatttcagaatatttgcctatacataatgttcacatgggaaatctgggcatgagcagaaaagatatatcacaaatgaggatgactgggagggttttcttccccctaaagaatgctgaataaactgtgtattgtgtgcttgtattttgaccgcaactcatcacattaggtcaagtgtgggattttccacttttggcatcaagtgggtgctcaaatctttggattttggagcacttcagatttcagattttcagattagggatgctcaacctgtactagtagctgatttttaaggtttcctttgttggtaatttttatggaaagaagaaaatctcaacagatgaaataaacagcaactaaaagtggatttatgttgtttttttttttcagcaataagtaaatgcaatcaaaatgttttttttttttaaaaaaaaagactgtcaaaagtaacacatgtaactaagagtgaaatctttggagagttagactttatagctccaagtgaatgtaaatgctttactaacagtggaattggaaattggataagttcccttgagatagaaatagtcaaaatgctacaggagattccaaactgcttgctacaaaaaaaaaaaaaaaaaaatccttagctttgactataagtagatctctagttcttctccatacaggagatatgtggtcttccatcccagggagaataatggttaggtttctcaactctcataacagaatgtcaacatcaccatctgctcatctggctttcaaaggatgcatatgggctcatcttctcgcccagaatctcctcttgctttggggcttttcccttcagtttggtctttagtatgtactcctaagtttgccaaatgcacactggagatcacagaagactttgctgaagaacagcccagtaatgagttgaattcttatctattcagaggtttccgtgaaaaaattcctctgcagcgtattcaaattgtatagccgcaattatactccctggctgtggtaatttaaacgttattttaaaattaaggcctttgttaataaatactgtttgcttaaaggttaaaaggtagaattatacccttcacaccaaattgcagtctccatgggtccttatctgcttgtattaattcaaagagaagattctgggtgtcatctgccacttagagcctgaagtaaacctctaaaagcatacatttctgttgttgtttccattctacatgggcttaaagtatgctttagaaacatacatcacaactgagatgtgcgtgggcattatgaatagttaagcaggagtgcagaaagcaatatggacagaagaaacaaaataatttcctaacatataaataaattcaaaacctacttgaaatgtagtatatcggaagaacattagtcagggtctctataactaattagctttgcgactttgggtaagacataatctctctggatatttatgtaaagctagaattatgtacgagaaaactacagtttagaaggaaagaaagtaattacaaagtaaagacattgaacataaatcttgaattttaccattaattgaataatggaaagaaaatacagactatattattaacttttatttgtctattttctctataaaattttcaatccatgatttagagatcatgtccatcttgatcaccactttatctctggtgtctagtacagtgcagactgaccatttaatatattttgaaggaaagaccaaatgagttttaaacatattatctaatactataatactcttatggtctcattcttcagttatttgctaatataatagatgcatttgtatcctctgtaatataaaaataggaagggatggtattggttgtagttgaatatttaatgggagaaagttaagcctcaaataagaaatttcctgaaatattaccaatgagaaaatgggtataaaaccttccattttaccaaaaacagaactttttttttatcacaagagaagggtaaacggttaattaaaagcaaattagatgaaataagatgatacaaagaaggtatcccatttaatgaacatgttagatactttagagaatttatttaaatttctgaacaactctaaaaaataaatccaatattagttttaaataagaataaattaaaacatagaaaagttaagtgacttatccaaagtaacataagctgtaagcagaagaattgagatttgagcactgatattactggttctaatgtcagttctttttacagtatccatttcacattaattgatagtctaccaactaccagatgtttcactgagcactctttaggaaggaagggaaattaaatattggcattagttaacgagagacatttctttccaccgagtgtaagtaataggatgaagatacattttgagatgatatgatttatccagaagaaaaagcaaagtttgttagaggtctccaatctatgataaaagcattgtgtaaaatacaagaaaagtaaatttcttaagagtaatgttagatgaaagcccatcatagttaatggtataagtaaaactgcattaattgtcaatggtatgaaaatgttcagataaatcatgccaggataaaacagagggcttataaacaagtcttccagttgggtggtcatcaaaaatgtatgaatatccactgagttaaaactacttactctttggctttgccatcttcatgtttagtgaagggaagcagggcgatttttggtgtaacgttccgcttaaccttcactaaagggttaatcaagaaccattactctaaaaactcaaaacaattctgcaagcctttataatgcctagtttatcccttaattttattatcatgggaattaacagaaaatcctcccaatacaaaataaagtgtgttctttcaaagatatacagaaagaggcagctgaagagatgtttcttcctcacattagccttgggcagggtaaacagaagataaaaatccaaagggacatactgagtaagaatagccattgaatgataggaagaaaacctaaattccttggtcttgtggacaaaatagaaacaggaatgcaaaaagagcctggaacccccagaggaccctcagcatgagcagcagaattatccacaatgattctcatgcatttgtactttttttaatcagcaaaatttagcagcttatatttcaatgagagacagcaatgttttcactggggggcaattctgaaccacaggggacatttgacaatgtttgtagacatttttgtttgttacaagtggagtggtggttgctttgggtatctattaaaaataggtagaagcagggaagccgttaaacaccctaaaattcacaggacattccaccacagcaaagaattaactagcccagaatgccaatagttctgaggctgtgaaaccttggagtagaaggagaatcagcatcaaaccctttttcataggcatttttcaggtttctttgttacatccgactgaaacaggcttgactagcaaatttcaagagtgaccttgtttcaaggtgcatcatttgtcggcatcaaattcacatcctctttcttatttaaaatctaccattagttatttctccctcaaaaggcttctacaatttaacagtgaggacatgttatggctgtgaaatagatgtccctatcatactgctttagatgggaaaagaaacattctgcagtgtttataagtcataaagaattctaaatatctcccactcaacacattcaggcaaaatgatggtataatttctgtgctgggtagcactctttcataccattatgtgtcgtgtgaaccaactgtaggtaatgcactatcttcctttaatcaaatctgcattgtaatttctataaaaaaaatcaattaaacacaaggagcaattacttattttttatcacagcataatttactttcccagaacagcagcatgaaaatgtgaagaaagatctcatctacctcagtgtatttaaagtatgcatatttttaaataaatgcgaatggaacactgtcaaataagcaatatattatctctatataattccccatttacatcaactttatggatgggtaatatggcttaatagcaaaagcttaagatatctttttgaaacacaattttttcatagtcaatattatggctgaaaacatttttcagactcttacagtgaaaatataattagacaacaatttgctcatcaacctcatcaaatcactttcataaatgacctacttaggtgtcaaataaacctaaaagaactatattttttccaagccttacaaatccatccttgtttacatttccctacctatctctgtgcattactatcaaggaattttgttaactacatgcttagtagttagtaggagatcatggagctaatctagcatccttacatctgggacctgtagtcttttcagtgaaatctattttacactgagcatcaggagttttttaactttatgtagataagatttacctggagggtttggtaagtaggtttggagagcccccacatttacattttaacaaggtctcatgtgatgctgacgcttgacccataggtctggaaactacccaagaatttaaaagacccaattttcttcatgattcagtaatctgtatgtgctcttaaccactgtgtcagcggcatcagtttattttttctcccttacttttatgttatcaacctctgtgctcatcagttaaactaaaagatcaatccactccaacctggaagattgcattttctttccttcttttcttgcctcttcctgctcctccctttcctttctttctcctcctctttcttctctccctctttctctctctttcacccccttcctcactccccaattccctccctcccatataattctgtaactctgatctctttcaaatccagatgtaaatctcactttggctgtgaaatcatctctgatttaccccagttgatacacaattctcctccatgtggaactgctcagtacttatgaactcacttttattagacttgtttgtactccttgcttcattaattagtaaattaaagcctttgtgtatccctatggtgcatggtcttaattatattattatactatttgttacatgcattttttttttcctttttataacaatgcctgctggaatgattggctcacaatcagtgcataataaatattattagcccaataatgtactgagtcaggggctgcaaagcagtatttcatcacgcaatgacccaaggttcacaagaaatctaattagtgcttcaactaaagccaccagtcaagtctgggggaaactggctccaaatcacaatgctgctttagtttcctcagtagctgctgatattatcctattaatgggggaactttatggaagaattattaaataggcttggtctggttgctaggctgtctgcgtgactataacagggattctcagaagccatgttaagcatgttcaaatactcctaaaatggctgctggtgatagagaaagtagaattctccaaagttaatttttatacttctttaaaagcctggtttgctctaaaggaactcataaatgagacatattttaaccacttcatcatatttgttggatcactctgttctgaacataagcaattttggaatgaaggccttctggccacacgggtaatatatgtgttgcaaaaagtgggacaccatgagaggtatggaatgaatgaacccgctctctctctctccttctctctacttcaccactcccaccccaacggccccatctaagatctggatgactaatggaaggttaattctctgaggcctaaaggaaaatttcacactttctcagtagttcaaaagtttggctttcccctaagtgataacatacaaatggagtaacagcagaactctcaacattaaggagtttctgtgaaggtgccaaggcatttatttaaaagttgctaatcagatttcaaggcccaaagtcccggctccctcacattagtgatcagatttgttaactttaatttttcataacaatcccataaatttatgtgtttatgagttttttagtattttagtccatttgggctgctacagcaaaacaccttcagttggataatttataaacaagagaaatttattgttctcagttttggaaactaggaaatccaagatcaaggcaccagcaaagtttggggtctggtaagagtccagtctctccttcaaagatggtgccttgttgctgcattcccagaagggaggacactgtgtcctcacatggcagaagggcaagacagctcccttcttttataagagcacgaatcctattttataagtgcagagccctcatgacttaataactttccgaaagtccccatctcttaatactatcacattaggtattaggttccagtatatgaattttggaacaatattcagatcatagcaattagtttatttttaaatttttttcctgattggttcataattagatttattgttatatggaagctgaggctacagacttttttcctctgtatcatagacaagatattagaaatgcagcaacggcatttgcaaccaatatccaggtgtagacagtagttctcaatcactggagatattgctccccaggagacatttgaaaatgtcttatgacacacttgattgtcacaaagatggaggggaggaggaactctacagcatctagtgagtacaggccaagcatgatctcaaacattttaaaaacacagaacagcattcccaaacaaaaaatcatccagcccaaaacgtaaatcatgccaatactgaaaaacacggagctagatcatgggtagactttggagacaggttaatgtagactcttctacatattatctatgcaaactcgggaacactaattaaccctaacacctcaatatcctatccataaccagggtttagaaattattccagcgcaatctctggaaaggaccgaatgatgtaatttatgcaaggtacctatttcaatgtcagatacagagcaagcactcaataaatggtagccctggcatatcacaggcactccataaatgttagcttcccattagttcaaatatattttgaccagaagcttctcctagagaaactgtcattctaagacaaactaacttcagtgaaaatgtccagaagttcccagtgtaagctaaaagaacagttgtcttgtacacaaatatttaggtgatcaggcttctctgctcacataactcaactatttaaatatatatttgatatttgttatttgaggcgggctggtagaaattgtatgctaaaagtagatatttcctatgattctgtagaatatttaccaggagaaggaaagagaatgcttaattattaggaataatcatccaataaactgttcacttgaaagaaaggaataaggagaatatgggggaaattctagttatatataatcacttaggaaactccaatagcagtaaaagcattggttaatatagttgttatgatctcgaaaatgcagaccctcaaaatcccaaatcaatattttcctcaatagtcaaaaagcagaatttgtttaaaaattattttgtataattagaaaaagcttctacctttcttaaccagaaattgctttttaagtctgctttttcaagtattagagtactcataaatatttcagaaaagccattcagtttcagcaccacatgaaaaaggaatgataactttatatgtgtatctctgattcaggacacattttctgaaccacccatcatattccatggacccttaaaattctctggttcagcaagttaacactgcccacttcaccttaacaaagaaaataagaaagctttaggaggcaaatttaaagaaggagaacattctccctgcaatataaagaccatggaggctatacgctgattgatatttctgtacaaatgggtaaagaaatatcagaaatgggtacagaaatatcagctactctactaaagtcaatgccgtgtctcaaatgctgcaaaattacagcagtctgtatcaattctcttttgagcaatagtttacaaagccattcaaaaactgtttaaatttttattaaattcaaattttaacctttaatatcagcagattagaagatcttgctaaaaaataatttgagaagcattttctacataggcacttgagttattggcagcaattgctgaaaagttagcatttttatttctctgttgttataatgtgtctaaatattaggttggtgcaaaagtaattgcagtttttaccattgaaagtaatgacaaaaaattcaactacttttgcaccagcctaataatttggtataagctgtctatctatatgtgtatctaccatctatctcagtatcctctttcttgttggacatgaaaaaaataatataagctaaatttcctctgttcatttatatatgccgtgggatgatactgcattggtaaatgaattcatcggtcaatggatgagttatttgtgtactttgttccatgaagacatattaagtttcacctaaatctttcactatgtttggattccagtacaaagtagtttttgagatttgagaaaggacaacaatttaattcctatacagatggtgaaattgaaaggcagaagaaacacctgcattttggagagatggagatgagccacaaagtagagagtcagagtgtgtgagaactgtccaataaagccacccaaaatctgaggtgggctgggggatgtgttcagcacatagtacagacaatcccctaattacagttgttcagcttaggattctgcgaccttatgatggtaagaaagtgatacatattcactagaaaccgtacgtcgagtacccacataaccattctgtttctcactttcagtacagtattcaataaattacatgagacagtcaacactttattattataaaataggctttgtattagatgaatttgctcaactgtagcctaatgtgcgtgctctgatcatgtttagtctaggccaagctatgatgttcagtaagttaggtgtattaaatgcatttttcactgggctgtaactccatggtaagtcaagaagcatctgtatttgtttagaaaatacttggattcaatttccaactctaatcttgtgacactttaagacatcctcaattacaaacacacatacacacacacacacgagagagacagagacagagaaacacacatgataatttttttaaaaattaaatgtacttaaatttaaaagatgctgtgcacataatttgtggaaataaatgagagaaatggtttcacaaaacaaatgttgaagaactgtagttatgcaaaaagccaaaagtcagtatttcgtgacatactctttggcctctaagcaggaataacgcactgttttaatcttgtcattttatccattttattttgacccattgcttatactgagttcaaaggtattttgactttataatttttctattttcaatttcattgctgatttgtcaggaaatctctgaggagcccagttttctcctttaactaatagagataagaggatcactcttcccgtctcaaatcatcctctattcacaccaggttaagcctcactatctatatttacattgcactttgcatttttttctatggtacgtttcataatttgaaaacattatttttgtactaatttatctatgagcgattataggacatgttgtaggaaccatgggtgttttgctaacagatgtaggccaagtcaatgagttgctactgcctaactcagtgtagtcacctatggaatagctataaaatgaataaattaataatgaattttttttttaagacaaagtttcactcttgttgcccagaatggagcacaatggcgcgatctcggctcactgcaacctccacctcccgggttcaggcaattctcctgcctcagcctcctgagtagttggaattacaggcatgcaccaccacgcctagctaatttttgcatttttagtagagacggggtttcaccatgttggtcagcctgttctcgaactcctgactttaggtgatccatccgccccagcctcacaaagtgctgggattacaggcgtgagccagcatgcctggccaataatgggattttaatagcacttgttacaaaaatcttcatttttaatgacatttggaactattttttaattcttaaattgtctaacattttatagtaaactttattttacgtcactttctaatgtacgcaagcataacttcagaatttactgagattttttgaatgacttctattaaactaatttaattgcataattttctacgtagcaaagttatttttttccaatttttaaatttctctgattctttaaaattagcattatcaattattttttatgcaagtttataagaagcaactgattcactaatcaggcttatttatgtcaaagtttctaattatttccaatatagtgaggtttttagcttaatttttattagcatttctacaaaactcaatttttctgagtcaaatcactcagattctatttttttgttcaggataaaaatgtacctatgacaagtagtattgggttttataaaaccataatttatatctgatgattatgtcaatctgcaatatgtattgtgaatcactttatttcttggagaaaggaacagggtaaaagtttcagactctgtgaatatctcttagagaaaaaaatatcatagttacataatgatgcaggatctgtggatataataaggtctaaatggcaggactaaatgcgaggactaaagcattctatgcttccacattatacctatgacacaagctttgatatttaaaaataaacaaaaacaaacccagatactcccaaaatatgcacaaaaaacttcagcttttataagaaaaaaagcaaatatcagtttatataataggtttcctaaatgttttgtgagaatctagtttttgtataatatttatatttgtattttcattatttcaaggctgggtttgatgtattggaagcaagggcacagatttggtaaagcagtgaatgcttccaaagacaaaaatttatttctgatataacttttgaagcaatgtgaattttcttctatcaagtttccttaaatcgaaatcaaactataacaatatcttggtttctatgggttctctgtcatgtgcatcctcaagtatatgtgaccaaaggtttttaagccataatatcactattatatcatcacctacctaccataagaatgctaaaaattgtcctctttgagattttgatagtttaatatttctgtgtggaaaaaaaatcaaacccaacaaaagaaaataatatatgataaagaattacaaggccttctatcccaccacttgttataggtttaatggtgtggccctcaaaaggatacactgatgtcctaaccctcagtgcctcagaatgtgaacttatttgaaaatagggtcttggctgggtgcagtggctcatgcatgcaatcccagcactttgggaggccgaggcagggggatcacctgaggtcaggagtttaagatcagcctagcaaatacggtgaaaccacgtctcaactaaaaatacaaaaattagtggagcatggtggtgggtgcctgtaatcccagctacttgggaggctgaggcaggagaatcacttgcaccctggaggcagaggttgcagtgagctgagatcgcaccattgtactccagcctgggcaacaagagtgaatctctgagaaagagaaatggaaggaaggaaggaaggaaggaaggaaggaaggaaggaaggaaggaaggaaggaaggaaggaaggaaggagagagacagagagaaagagagagagaaaagaaggaaagaaagaggaaagaaaagaaagaagggagggaggagggagggaaggaaggaaagaaaatagaaaatagggtctttttagaggtaaaatcaagttaaaatgaggtcattcatgtgggccctaatccaatatgattttttgctctgactaaaagaagaaattgggacaaagagatagacacacacagagggaggaggatgtgaaaatacgcagagaaaccatgtgaagacagagaactggagaaatgcatctgtaagtcaagaaatgcggaagactgcctgcacaccaccagatactaggaagacacaaggaacgatttctctgcagatttcagaagcagagtgaccctgccaacatcttgatttcagatttttagcctctacaactatgaaatgatagtttcttttgctgtaagtcacccagcttttggtactttttgtggtagccctaaacaacaaattcaactctttttccagtattaacagtagtaaaattaaaacaaggataataagaaaagaaaatctacttttctgcttactcttataaaatctgcctagcactcatttctgctgatttgattacatttacatacaattttaattaaagaactactaataaatgtttcaattacaggaaaaaatacacttaatgaagaaattgtctatgatgatgatctgagaagccttttcagaaaatgttgttgatatatttatttttcttttctactattacagagaagactggaggagaaactaattccaagcccccatacatgatcaactgagtcataaatccttccccagtgtaggtgagagttcacagatactactctcataatctctctagtaagtctttccatttctcaatcatttaagcagtagaggacactgtttttatttctttgcattttcaatgtataaatcgtgcaataacacattgttcaattttttctaagttggtttaaatgctgagaattctcctgagttctcttccttggcagaaaaaataaatttctggaatattttcaaaagcatatccttgcaaatggaaatggtaagcttaataaaccatgctgtttgaggtcagccttgctgaatattgctcctcatatcatctttagttatataaggtcataagggatacttacgttcaagatcataaacaaaatgttggtgtagctcagcaatttcttttctatgcttaagaattattttcaaaaacaatatcacttttaacatacttctgattctcttgatgataaccccaggctttgatagtttgtttttcttttcagcttttgcactgggcctttgacatatgaatatacctgtatcactctcataaacttcagaagctttgttgcattttccttcaaattctctctgggtcaacacttaaagtataatccattaaccaagcccttgcaatatccacagtagaaaatgaagataagtaaatattgctgtgattcttttactgacattttttccaattcttacccctttcaaacagcgaatcagttctcgaaatgaaatcaatcttgtagacatgattaccaattataaaaagatgaaattttcaaattttattaattggatcaatttttagtatcattaagattaccttgctttcatttacattaggtgaagttatggtatacaatgacactaataagcaaaggcgagtttaaaataacaagagctaccatttattcaatgtggtattatgtggaaagaaacagtacctgatgctttgcaagcattatcttgcttaatttgcttcataaaactatgaaaaacatattatttcagttttataggtgagggatgtaatcgctagtacaatataggaaacacatgtcagagccaagatttgaagttgagtctctcagactccaaaatctgaaactttttcaaatatgccgtcttgttttccacactgatgcttttgacccttgccataaagtcagcatgacctctttgacaatgtgaatacagttaacactgtgcactttgaacaaaagaaaaggaagtaaaaggacaagaccattttcaggcaaaatgaagaatatgcaaaatgtcccctttttttctttctttttgctgatttccttcctaattccctcctcactactcccacctctaagtcaaaagctttttcttctaccttcaaacatctgcagctatgctatttcttaatttacctatcaaaaccacttttctctccaaccactcttcccttctcccaatatacttttatatcagtagttgttatccaatgactatgaatttaagtcttttgtttctttgggaacagtgtgtgcatgtaagaagaagcagtacagtataataaagaaggcaggtttgggagccaggctcttggctgcatcactaggtgacctttttgtagcctctttgtgcctcagtttcatcatttgtcaagtagtgcctatcccagcacttactgtgggaattaagtgaagtgattagaacaatgcctgccacatagttggtaatatatgtgttagctgttatccaaatgtatctttcattgaattaaaaatgtaaataaaatatgtcttctactaaaggaattgcacaaattaccatgaaaaagtaaaaaaaaaagtattgggattttgttttattacacctctaaaaacatattacgtgaggactttagacatataaggttacttctatgaagaaacagaatggaaaatgtcaagtcatttaagatgctcacttattacattaaaatattttccaggcaggtgtggtggctcaagcctgtaatcccagcactgtgggaggccgaggtgggcagatcacttgaggccaggaattcgagaccagcctggccgacatggcaaaccccatcattactaaaaaaatacaaaaattagctagatgtgatcccagctgcttgggaggctaagtcacgagaactgcttgagcccaggaggcagaggttgcagtgagccaagatcacgccaccacactccagcctgggtgacagagtgagactctgtcaaaaggacggaaggaaggaaggaaataaaatattttccattgattacccatgctttttattttgaattaatagtgttcgatgcattattaaaaaatagaatttaaaataaattgtagaaaatatggagagaaatatttatgtttcaaatttcccaagagtagggctttggtgcattataatcccctgatagctggcatgatccactttgttggttacttttacagggtccttctactctcttccttagtctccaggcttttaataatcacacagaatattcttttcactacagaacatacctacctatattttggctgtttctcaagctgacttatttcccagacatattcatcctttaagtacgcaaaaatgactttcataatatttccattgataggcaatacacaaatatgtttaaatgaaggaataatttattgcattgtactttaaaatccacattccttgctatacataatctgaaaccactgtaaaagtacacttttttaatgcaacagcaggcatacattttttccagtttgatgtaggcaggacctcaaataatgtcaaagtaaagatggtcaatctattcactattggaggaaaacattcactgtgtatcagcttgagttggagaaattacagttaagaaatgttttgtaactaatgatggcttccacgtttgtaaatcaatgactcataatgtatacatgtaaacctatatttcattattttgttagtaaaccccattataacatatactttaaccctattattcaatataaaatggcaaatgcatttttatgattcatttgtcgtattgttattttactcaagatttgttcaaatgttttactttttgtaagttaaactttctatgcttaaggagtatatagctacaagaaacagataaacactaaaaattacagttctaagacttagttgaatatctttcagtaatttcccttagagatatggtcacactgaccaagctacataaatatattttttaaaatttagtataccaatgtgtctattcatgataggttgtgtttttctccttgtacctaaaagtttgatggtttcttttccactctgtctctctctctctcttattgagctacctcgtactagtcctgcctaaagttttatattgtttctattctaactatactcagaaatacataatttgaaacttgaatataacctcttttgtatttctaatttttggtgagcattattctggttgttagccccttgaaggcaggtactttgtgttacattcccaatttatctgacaaaatatttagttcagcataaataatatgcttagcattcaagatataatttgtgattaatttattttgctttataagaggaattctgggggtagcatacacgccaatcatccttgaaatatatataaactacagtgcctctagagtgttatagaaaagccagtggattaaacatcaaaacctcttagagtctctgaatcatattattctattacttctcttattttctttatctatctttgtctcctattataagaaagaagacataaagatataaaaaacttttcctacctctgccttgaagaaagtttaactataaccttcataattatgaccagggacaagttaatgacagattccagctttggtatggctaaggtagaccactcaagggatcaactaactaatatcaaggacagtaaggttcttaccccattcatgagcttcaagtgttctatctcaccccaaaagagattataactctttttttacaatttcattttataatataaaccactatttaacctatatttctgaatcactggactgaataattttatatcaatttattccaactgctatgaatactgaaagtgcatgaatggaagatggcggcccatgaggcaggccttgttaacagtgtttccccagcagaagggtaaaacacaaataatccctccagagaatcaatttgcaaaaggagctcttcaaggttctgaactcctttccttgctctgctgtactaattagatctgacctaacaatgattctgcttatcttggcgttgtgtcactacccttagctatactttaaattaagaaactaacataatttattttgagttactagtacaaaagaaagtaatcttcttgatgggattcagtttgaggcagtaggttctgtataaaaatttttatcgtagatacaattgtcacctgttttctagaaaaaatatattaaatataacctaatgaatatgccaaacttactaggtctgtatttttgctttatataaaatgtcatcaaatttaaatataattcccaataaagtccacatctctgaattatctattacttgcattttggggtgtgtttatactacctagaatgttaacccttattgtgccttaaatgtgcatttgtaaaatgtaggcacttttataactatgagtgaggctggtaaggtagtgtttaggattctccatgtcagttagtgaaagtaagaagtacagtgttaaaactattgtaaatagtttccggggcaagtatagactgagtccatccagaatgactgtaaccaatttgacatcatgttatggataaagaagcaatgaaaaataaaccaaatagctacattatatcatattcttaactttcataagccatgttttatggaaaactttttagttttctcaaaaggctaatatatttcaatattttgaatacatcattgttaattttgagttggcagaggtaaattaaccaactaccattacgttttaggattaagagatatagcttttaataaagttactgaaatgcaaaaaaaaagagaaactaacataagttaaaattgattgtacatagtgtcaagacagcaaactcaaatgtctaaaaggaccagggagaaaatgtcaataaataaatgtttgtgttcaaggaaacccaaaactagagcaattgagggcccacacaatctaagcatagtgttttctgactcttgatgcatcaataaaatacttggcctctgataattttattttataagataaaccagtatataacctatagttcaagatcactggacttcacacttttataacgatttactcaggtaactaaaatatttcttcgctgagaagatcaccctactgcctcactttcaacacattaattaaagatcttagaaccataacaagctttaaggacttactaaacaattaggcaagaaattacaattttgccagtcatcccaggtaatcataccatcctgactcataaaatttccttatgaacatattgacaacttttaggaaaaaatctttctaacagactgcttgggaaaattcataatgtctctggcctggtcacacagcttaagtactttccgtagaaaatattcatgggatttatagaaagtcagtctacagtgtttacagattaagaatcagacaatcagggtcctcttcatggaaaatgaggatctatttacagtttatcaataatcagagatgctacgaagttgttagaatgagctaggtgtagccttgaggacttagtaaaagtcctcaaaggaaacttaagcataagcagagtaacttctctctgaagaataaatcaggatacttcctgatgtctaccgaaggtcccttgaagccataagcccaaacatttttaaattatttctgtcccaaatcctctcgctaaggaattaatgtcatcctttaaagatttagcatcatatgaatggagaagagccaggtaggtgctttcctagagagaaaaaataaatcaaacacaattcatactttattccagaaattaagtgttaacatgtcaaatgcttttgtctttaatttgaatgtctttcccttcataattatgtagagcagaggtttagtatttttgaggctattaaaattcctgagataaacttgatttttctctatgccgtcacgctccagaaaacataagaagaatgttaattctaacctaaaagaacccaactacttctgtggataatcagtttaaacatccatgggtcagaggaggggatgacagtttattgtgataaacacatgtctaagagaaccagatcaaggtcactgacatgtttaatattaattgctaaacaactgtcagatggcaatggtttgagttcaccacctctcatgagttgaatccaaattgctctctgaaggagaaatcatctactaaattctgttctttcaacaatgaaaacaggcatacctgtcaattttctatataaaaaataccattgtgtttattcactcacgtggattttcagctctgccaattcaatttcttcactgaacctactagtatacgcctcttcaatatagtcacgttcaaataaataagagtaatattctcattgagaaagggatatatacctcagataaattcattgttccctcttaccctctgttgttgataaatttagtttccaaacattctaaagcaatcttttgaaatcatctgttggcttgagtacaaagaacatgaggtccaactaattccaagcatttctttaatatggtaaaggtgttgctttgattgttactctcagccacgaactaccattggatcatttaattccttcaaaagcaattgaaggactggcttcaaacctttcaaaatctgttttcatatctacatatactgagaggaatagagagaagtttctgaataaaataataatactttgcagttctctgaaacttgagagggaaccagagaatgtttattactgagttttaatgtcttttaaagagccaacacctgatacttcaaaaacgttaatcactccaataaacattttactcccagaaattcatcttaaatccatcttataacataaacaagcctagtaagtagcattattaggagaaatttctggctgagttccacacatatattcaacttcctgaacaccctctaaaagcaattttaccttacttgacacaatacagaaattaatcagcataataagtaagctaaaacttcaataaaagtgtttgcatcttgtccaggcaggtggctcatgcctgtaatcccagcactttgggaggactaggcaggtggatcaagaggtcaggagatgaagaccatcctggccaacatggtgaaaccctgtctctaccaaaatacaaaaaatgagccagatgtggtggtgcacacctgtagtcccagctactcgggaggctgaggcaggggaatcagttgaactcgagaggcggtgattgcagtgagctgagatcacaccactgcactccagcctggtgaaaaagtgagactccgtctcaaaaaaaaaaaagtgtatcttaatttgaaaatattcataaagaaaagtgtaccctggtaagggggacagataacctaaaagaattatagggggaagagttttacatatataatgatcacattttaaaaattatagttgacctgcagataaataaagtatggtgtttttgcctttattccttaaatataatacatatcctttctctcaatgaccggctaatccaacactgatgattccttgaaacatccctgtgacttaaagtttacaatttctaagaacttttcctaactcaccatctctcagttattcacacacttaaattttcttttatcctattgaaatcatgcaagtattgtctgcaaccaagataggtaaacatatcttctagaccactagaacacatggctgttttccagatatacaataagtgatgtcacagacaaagaatcaagatacacacttctctttaccactgaaaatgttcacctcacatttttatctcaacttaggtgggtgtgtttttgttttttgattttgtttttcctacttatgaaaatagtgccaaagatcttcagttggcactccaaagcacagacaattgcaaccaatgttctagagttacttctgaatattatcctagacaagtagcaggagcactgacatgttttcataagagaataaaagacatacaaagatttattatctggcttcataaatttaaagcaactgtagtgccttgaatgtctttgtataaacttttatatgactctaaaagaagataaaaatctaatagagactttcagaaggtcaaatatgaaagatgatcatgtctaatgaataaattgatttctgctggagtaaataggtcacaattccaaaaagaatctgtattattttttgacagtgcacctaaagtaaaaatgtggctccatattatgtaagattttggtacaatatttaaaattctaaaatcattaagcaattccaacctatacagaagtatgacaccttgggattatctagactatatggctaactcttttaattgtatacagatgttaagtcttacctctgcatgtgtgcattgagaaaccagatgaaaaaaaaaacttaactgtacttttcaaaaaacttggttagatatttttatttaaacatttggttttgtacagtatacatttaaattacattgcttaatgaatccatctgaaaacagtcactggttgcttctgtgatttgtgaataggagaacatataaatatagcagaatgactttgtctagcaacatgttcttgccaagataattgggaattaaatatttaaatacatggaaataatatctttgcggttacatatgtgacttccaaatcagaccaaactaattccttaggaaggccaagagatagtgaagccatagcatcagagtgacacccagaaattacagacgacaagcattatgcaaaggcatagaaaatttgagattttggttttaagaaattttcctctttgtaagtcaatgtcttagtaaacaggaactatgtattcattacaaacatattgatagatgtgtatgtgtgggcattcatgtgtgtgtatacatgactataattcacaatttaatttgggtagataaatagatattgtatagatccacatatactttcatttggctatatataaaatatatatacataatatatagaatttcatctggttattatattaatataccataaataataagagtgtgtgtgtgtgtgtgtgagcgcatgtgtgtgtgtgtgaaatttagctataaactttgagaggggaaagagaaagcaaaaaaaaaaagaaaaggaaaagttaaacctcagaagagaatacactgatctagtgagtttttttaaatcttgaaaaaatggttttaaatttttgtttgatacttttgtaatctcaaagctgtcgcaataacatatagtggttttgaattgaaaaataaaaagataattgcctgcgctcagaagctggagatcagtttgggcaacacagtgagatctcacctgtacaataacatattttaaaaaattagccattggagcagtgcatgcctgtagtcccagctacatgggaggctgagtcgggaggatggcttgagcctgggggactgaagctggagtgagccatcactgcctcattgcaactcaagccagggtgacagcaacaccttgtctcaaaaaaaaaaagatattaatggcttaaatatgcataatctcatgtttgttaaatgatgcacagccatgaatttactatcaataaatatttttaccattttcttttttgttatcttttagatctccatcaaaataaacataagtaaattaattctttatctttacttttgcactatcttctctcgtttatagctttatcttttcaatcagtttctagcttcctttggttttattagtaatgtattacatttgcatagcattatgtattatattgaacaatataaaagtgccttttataagtaaaaatcgttgattattagcaatttcatatggcttaaacttaactcttctcaaagtgcatttttatgaattccctcatttgatcatcaaccttgttataagattaatactcaggttacacaaaagaaaataaggtttcaaagagttattactaagtctgaatcagctagatatgttaaagtactggtgcattgattgtagattaaagatgtgaacatgcatatacaaaggcattgtcctgaaattggttttaattaaaagctcaaaatccacatttccatcttcccgccacaatctcttaccccactaaaaagttatcatgatgattaacatggggccttacttcactgaactactaattattcttttcagtgcttcttttattattatgactttaacaatacatcttctgatcttactaatatattttttattaagaagcttagttgtttctaccaagattaaagaggagatcatagccaagtttcttttaaaaatgaagactgcttattcttagcaagaggagaaaaaattgagggcaaaattttgtggaaatttaatttgcctcatttgtccacagtaggtaagtatggcaactgtatgcaaaatgcagcagccacgcatttcatcagtgataatatgtgactagactttctaccctctctgtttgtttttgtttttgtttggtagaggtagcacctcccagtgttgctcaggctgttcttgaactcctggcctcaaggaatcctcctgccttgtcctcccaaagtgctgggattacagatgtgagctgccacacctgcctttcttctcaattttttaatcaatataaattataaaatgtggttcacaactaaggttgaaaaatatctagtccttcaccccttaccccttctcattccccaaaccctgtgaatctactgtaaaatgaattcataaaccaagagtcattgcttttttattctactgcttacattttacttggcaaacacagaaagaagttgggtagtacctcatggaagaacaaaaaagaagaaccctggggaacaatttctgggagtatatcataccacatgaaatctggaaaactccttcattctcatctgtcttttttccattctaaatcaacacactaattggataaaattttgcccagttaacttatacttcctgcaaatattacttcaaggatctcacttaaaaatgtaaaataattaaatccccccacaaaaagaaataatttaaaaatatacaaaggtatttgatacattttattcttattctctcaaaattattatattttgagcagaattattatattgaaattctgtattttccttacttagcattgcactgggaataagctggacaccatctgtttgattcaattgtttacctcaaaggggaagtaagttctagaaaacaactctgaaaaactgtgtagatgaactttctgattctacgacatagaataaggagctatatagagaattcttagaactatgtcatagaatcagaaaatgtataaggcagaattcttagaattatgttgcaatcagatgaactgacatactcttttttttttcctttttgcctcttcgctttacaatcaagttaaaccaatttaccttgactgtgtttgcactattcctacttcatctttattgagtaattatgttccttctcatgacaacaaaactacattttgaaaccttctcatttaaagcaggtacacaagacaagacagacaccgatctccagtgcagaggtgcattggacaatgtgacaagggacgcagtggtaattataaaagatctgttgacattatgtcttttctaaatcccattagaatgatgcattttaaacttattatttgatcaggatgaggagagtaagataattaaaatctttacagtacctatatttcatatactaaaacacagtaacaatatgtgagaattatatttcaagcattgggtcatttctgtgtcttataagtctctttgctatttaagaacccatggtatttttttatttctatttctatttcaaatattaaaatgtttatacccatatgtctatttcagaagaggtattgtaaaatgatttaaaattttgtggtcccttaataaattctatataaaaagcatagattaaagtggtcaggactatttaaaaaccagtatttgtgtgtatgtatatgtgtgtattttaagagagtgaatatccatgaaacatatcctcataaactggcctaactggtcttcatagaaaagcattattttcacgctattttatctatagaattaattgttttgcatagtcatagaattttctatatacaagaatccccagtgcccatcttcctacaagttaaataatgcataagtgtatcctgaaaaatgctagaatatctctcttcagagaacccatgtaaataaattagctcatattcttggaaaacagccttgctgtgtctgtgtgttctccttcaccacacctggacagacctcaactcgtaaacaaacatcctaagatcttaagtataattagtgcaaccaaaacacttgaatatcaatattattctttttaattgcattagcttaaaatattgtatctttttgttgtctaagaaccagagccctatggttttctcttaatgttaaattgtctataataatgagtcaaagtcatattagaaaatattagtactcacatggccattatctattatgccccattgatgaacgctttgggagggtgatgttaaatcttcttctattttatttaggaatctcattggatatcatagcacagtctacacatttcagtgtctcctgggtggcagacctcacagaatgaagccaggagccttatgctgagagaataggaatgttcaatgggttcttccttcatcaagaaaaaaagcacccagaaaacaaatagctaacagccatcttgaagctatcttgtgtgcttgtctcagtaaaaaaactaaacagaaggaggaaaaaacaaacttgacatggttaaaaagcagaggctgctcatctggatttatcttgcgttatgcttttttaatcaaaaattcttcaaagcttactgattgtttggttcatgaggtgaagggcctgtatcttcaaagaaagaagaggcaagatctgctaaaagagaaagcctctcgtgatgatgtacttactgccactcagaccagaaaagattctggccctgatgcagttaatcacttgggccatgagttggtcactgctgtatcctacggagagcctgaacaagtagaacttttgttgagtcattcaactgtagaatttctgcttcaaaggcaacaaagtcctttcctccaagatattaaaacatagactaaccaggaatgatttatgtattttaagatacaaataatacggatttttttaacactattactaaattatgtttaaggtctttgagtttaaaactgttaggaggactctcaggctatataaattacacagggctctcggagatcacaaactgtctaaagaaaaagggtcatgaggaaggcaccatctctccccatgttttcatgactgaatttccataatttatttagtttctaccaatgacagaaggcgggtggaggaaggaacaagaaagctatcttaaaaggagatacaacagagtaaatattttcccagttagaatcttagtgactttgaggggattaaaagaacctactgtgaataattatacatcaataacttggataatccagaaaaagtatataaattcctagaaacatacaacctatcaactgaatcatgaatataaaatctgaacagttcattaactattaaggagattaaatcagtaattaaaagcctcccaaaaaagaaaagcccagatgagatggttgcactggagaattacacaaaacaataaaaaaaaatagtgctaattcttctcagaattttctaagaaatagaagagaagagaacatttccatacttattttatgaggccagcattgtggtgatagggataccaaagctagacaaggactacaagaaaagaaaacaacaggccaatatccctagtgaacacagatgcaaaaattcacaacaaaatactaacaaagcaaatttaacagcatattaaaagtatcatacatcatgacgaagagggatctattcctgggttgcagggatggttcaacataccaaaagcaaatcaatgtaatacaccacattagtagaataaagagtgatcatctcaatagatgcagggggtaaaaaagtattttactaaattcaaccccttttcatgataaaaacacttaacaaactaggaatagaaaaattacttcaacataataaaggccatatgtgaaaaacccagagctaacaacatactcaaaggtgaaaaactaagagctcttcctggataatcaggaacaaggtattaatgctcactcttgccacttctattcaagatagtattggaagtcccagctagagcaatgaagtaagaaagataaataaaatgcatcaaagccagcaaaaagtaaaaaaaatctctgtttgcagatggcttgattttatatgtagaaaaccctaaagactccatagcaaaaaaaaaaaaaaaaaaaagttggaactaataagcaaaaaagttgcaggatacaaagtcaacatacaaaaacaattgtttttttttttattcctgaaaaaaagatattaatagtttgataaggattgcattgaatctgctgattgctttagatagtttggacatcttaacaatattaagcattccaatttggaaacacaggatgcctttctatttatctgtgtcttatttaatcagtatataagttttcagtatataggtctttcaactccttgggtaagtttatcactaactgttttattatttttgttgatattataaataaaattggtttaattttttatttttttattgtatatatccatatgcaaaagattgaaactggatccttatcttacacacaaaaatcaactcataatagattaaagacctaaacataagacctgcaactgtaaaatgcctaaaataaaacacaggtgaaaagctttaaaacattgctcttggcaatgatttcctgaatacgacaccaaaagtacagaaaagaggaaaattggacaaataagactacattaaactaaaaagcatatgtgcagtaaaggaaatgagtgaaaaggcaatctatggaatgagagaaaatatatgcaaaccatatatcttataagaaatcaataaccaaaatatataaaaaactccataactcaatggcagaaacacaacttgattaaaaagcgggcaaagaacttgtttagacatttgttccaagaaatacaaatggccaacaagtatataaaaagatgatcaatatcagtaatcaagcaaggaaatgcaaatcaaaaccacaaggaggagggaaagcaatgcgatatcaaccgacacctgttacgatggccataaccaaaacacaaaataacaactgtcagcaaggatgggaagacattggaacccttgtgcacttttggtgagaatgtaaaatggtgcagccactgtgtgaaacagtatggaggttcctcaaacaattaaaaatagaactaccatatgattcagtatttaccatgtgatttctggtattcacccaaaggaactgaaaactaggaccctgaagaggcatctgcacttctgtgttcgttgcagcattactcgcaatagccaaagggcagaaacaacctgtgtccattgacagataaatggaaaaagaaaatgtggtatgtacatacaatgaaatattattcttccttagagaaataggaacatcttgttatatgctacaacataaaccttgaggatatcatgctaagtgaaagaaaccagtcacaggagacaaacattgcatgattccacttctatgaggtacctaaaatgatcaagttcatataagtagaaagtagaacagtagctgacaggggataatagggcatagggaagatagggagttgctgttcaatgggtagagagtttcagtcacgcaaggtgaaaaaagttctagagatcttccctacaacaatgttcatattattaacaatagagtcctgcacacttagcaatttgttaagaggataaattacatgttatgtttttttttaaatctcaatcaaaggaaagaaaaaaagaatcttagtgatttttagagcagtgattatttccctgaattatttccatgttcaccccatcattaaaaaaagaaaaatccttggttgttcattcaaccacagagaagtggttataaatcccaacatattggtactttactgttaacactgacttgagcagacatcactcatgataattcctgtgtttgccatttgcattgtatcaccctgacttgtcctggtacgcaccagcaccactctgctcacttgttaatacacacattttccactgcacatgttggttacaggtcactttttccttaaatttaattgcaacacttaagcatggactaaccaggactcatgtttttattaatacatttttaagaacccatgattgatattcttttagccctggggatggggatatgaaaaaaaacaagaatcatgaagtggtccagaaaattgctctggaccatcctgatttctctcctgtattaattcctattgaacttactatcctttctattgaattttagtgcagaattgctttctgatagtgtctatctttattctctttccccattaaatcatctcactgttaccttactttctaacaccacttcctgcacaggtgttgtgtgtcccataatctcattgcttgagtgatttgaactaatttaactcacatgactgacagttcagtggagggtgtccttttgacagggtggagaagaagcttgactgtaatattgctcagctgtactgctatggacctcatttaagaccacaaacactttttcaatgatttatttaactttttgaacagataatatattcacaaagctcaaaaactaaaaagcacaaaaagatgtgtgctgcaatgtttccaacctattcttgtttgccgtctgcctttcatcctcgctctaccctccatccaggtgaccctgggatgtagacagcagtacctaaagtttcccagacgcttctaaagcagaacattgttgttttcagttgtaaacaaggaggagcctggtgtgatttcaggttccagtttccagatgtcgcctctctgtcagggatcaaaaccacttacagtgccaatttcacttgtcaagcaatcaaacactaaataaacaaaccaaatggatactgaacacccacgaggtctgtttgtgttatagattatggagaggatagggataaacaagtaaattattaatcttgaaacagatatgtggaaaaccatatctacattaaattgtcaataaaactgcattttctaattaagcaggtgtgagatttccatatatgcattcacccccaacaacatatttatttaggacttggcagaagtttaggtgtcatcaatgagaatccactcatttaactaatgagaaaactgaagttcagagatgcatcagggtttataattaagaatatgaagagtatggatccagccagacttggtttaatccaagcttgtccaacccacggcccacaggccccatgcagcccaggatggttttgaatgcagcccaacacaaattcttaaagtttcttaaaacattatagatttttttgcaacattttttaagctcatcagctatcgttagtgtattttatatgtggcccaagacaattcttcttcttccaatgtggtgaagggaaaccaaaagattggacacccctggcttaatcctaccacttagcagctgtgtgacattagacaaactacataactcctatgtgcttaaatcttcccatctgcaaaatggaaataagaatatatccttcataagactgtagtgattaagtgagttaacatatgtaaatagctaagaaggatgcttgacatagaataagcaccatagaagtgcaagctgttataggttaagtgtcttgtgaaagatgagaacagctgggagagtctagagagggttacatgctgataaaatgatgtactgaattatccattacaaagcattagaggaaaataaaattcataataaggtaatgtgcacattgcacacgtgaaaaaagaatttaagaaggctggagtaaaataagcaaattacactgatttagctcataaacaaggaaataaaaaaatcaataaggtggacaaataagtaggctctcataagcatcactgggccaggacaaaggtctcagagactccaaatctactcagttctggaaatgcttcctttatttatttatttatttttaattttctgagggaaaatacagaatgaaaaggacgtatactcacaggtaagtgccaaatgttttgataggaaaacattttaaacactaattgactttgaatcacgtttgagtaaattttggtcttcattgtatttaagtgatagtctaattactacctatgatttcagaacttttaccaaataagaaaataaaaacaattagctattgctcatctttttctatgtgagtgctaacataaatttttaaaatataaaacaaagtgaaagattagtataattttgcttttcattttaaaataaatatagctttccgtttaaactgtcttcagatacatttctctcagtatctaaaacaattactaaacaagatacgtttcaaagtaagaagtcatgcttttattaaagagaaaatggataataatgttcacaagtaccactgattcacaatttctagattagttatatttaagtgattgaacaacaaataaggaaagtcttaaaaataaatatttttctgcagaaaatacacaaatatattccactcttgagagatctcacctttgcataatataagacactcatctgatgcagttagcctatagatcctttaatgaccttacagccaaatctaatcaagcttagattgcaacagaaagtaaaggacacactcctattttatcaaaatgtgaatgctgagaaaaagagaagagggaataatatgccttttaaatttatgataagataattagcaaccttgctaatgtagttcttcaaacattaaatcctcgttttcattcttcttccctaccaaatttaatatactatgagaactctttagcttaattatgaaaataataataatagagttaagggtctgtcaatccagcttaagcccctatctagaatttagaacctggcatcctaattaaactgcaaatactttatttacaaagttattgtttatacattgtaatgaattaatctgattgaatctctgactgattatgggctaccatgtatattttcaaagcaatgagaggggcatacaattgcatttccaacattcagtcgctcagcataattagagaaagtaactatagacgtcaataatcaatgtgcacttgcaccctggagacctgggcaccattacgattccaggaacctctttgagttgtcattttaattatttgcatattaagatctctgcaggcaggcaatacttcaaaagataggccaaaacagctccttcaaatgttattaagttcaacattgccaaatatattttagttgccaattttgaaaaccaaagagattatttaaagtctatcacaaaactgttacagtgagaagactgagttaactacctgtgaccctaggccatcagtgcagacctggggttgctgaagatttggaaaagtgaatcaaaatttttttttctggaaaaaataataaaaagtaacaatacctaccatcatacaactacaataaaataaatgctttacaaataatgtcaaataatagatactccataaattctggtgaatctttgttattataagtagtagcagaggcaacatcaacattcacattcctgattcccatagcactgctttttctatgaattaatgttgtttcctcaactagactgaagaattaataaaaagtcctattttaccttaagtacaaagtgttttgtctacatgctaattaagtacgccaaattgttttctatgcttctagaagacaaataatgatttatgggtcctaaagagcacttggaatagtgctggatccacagtaaatgtccagtaattggttatttattgcttgatataagtaagcacacaaaatgaaggattcaatgttaaagaatcaaacagagatttatgagtgtgatcaaacagagttactatgttggaggtaaatttaattcttgtatatttcaaatatatgtcaaatatttctgggacattttgaattgactttcctctctgtgaatggcaacactacccaacatctatggtaagcctcattttctcttatccccaacaatgcctcacacacacaatgaacaagaaatgagaaacaatgtggtcaggctttctgtcataaaatctgattatagagcaggatttgctatgcagaagaatttagaggaagtcagagccacaaagtgtggctgtgccaccaaactacatttttttcacacacaaaaaagagaaagtagaataagaggctgaatggaaaggagaaataacatagacagtactgagtacttgttaacatccaatatataaaagagctacctgaataaacagagaaaaatatgactatagtattattattgctacaattcaaaccctttgagtgtgtgtgtgtgtgtgtgtgtgtgaaaaatagatacacaaaaatatcaaatgtggctatttatagatcttaaatacttaaagggtatgattattacaccttggctccttctcactcacattttaaagatgtagggaaaggtgatgcctaaaaagactaccattcctaaaatcttatgatttcacaattttctgcatagaagtagttgcttttaaaactctagtatgtatttgagctgtatgactccctgagaatggaatatgctaggatccagtaaagggatattgaggtttggcctaagggctaaacaaataaatacgttgaggccagaggcatagtcaaaggttagctccttggtaagaaaatagataatccccctctgaaaactccaggtgaatctagggcccagaaaaaaatacccacttctccagggtcatgcaaggctaaaacagaccagcctaggagcatggatacaaactggactagcaagcaccacaacctcagaaattagaatttggtgaggcagcttttcattagtaagatgaataacaagagggaatacttgttttaaaattgcatcaagctaactgaaaaagaaagattaggtgcaggcatccacaatttgttattatgtttttcaatcttggagaccggaattctcctgtgctttgaattaacagcacgcaagtgatacactatagagaagaaaagtcaaaaaattagtaaatcaatagggctgcctttatataacttgccaccataatttttccctggatgcttccaacgtatctatagttttgtttattcatttggcaaaatagggcacccacatccttggcacagttcatgggcttgaattgtaaccgggaagaagacaaatataattcctgctgtgatactgtgatttaaaatgagatatatacatttggtcttcactcccttctcctgacatataactcttaaaatctttgaaatctctggagtgataagaatatcatttgtatgctaatgaatgtttgctggctggcagcctctagatagcttcagaatgggggccagtcaccaagaccaagacagaattagagggttaaaactttcagccccaccaccaacatccaagtaggtgagaaaggctgaaagctaagttgataaccaatgaccaatgatttaatcaatcaggcctatgtaatgaagcttccataataactcaaaaggactggagtcagggagcttcctgacagctgaacatgtggaggatcccagagagagtatggcagctctgtgccccttcttccgtacatcttcatctgactgtttatctgtatcctttgtaatattctttataataatcaagccaaatgtaaagtattaagtgtttccctgacttctgtgagctgctctcgcaaattaatggaacccaaggatggggtctacagccagtcagtcaaaacctgtgcttgcaactggcattggaagtcggtcgggaggcactcttctgaaaatgatccttcaacttaagggatctaacactttctgctgctagactgtgtctgaattgacttaaattagagaacacttggcaggtgtctgttggagaactgctggcttgatgtttgggggaaaacccccacacatctcatgttagaggtattgtgttggctctgcaagagtaggaaagccactttgactcttcccacatatcttacatctgctctcatggaaattacagtggctatagacagagaatgaattcttaaacttaagaaaaacaatatagtttcagagagtgatccatgattggagctgtaaagaaaccagaagatgtggttgagagggactgggggaagggaaagaggggccacaggttggtggattctttaattagatgggctaattggaacatcctcactaaaaaggtagcatctgagctgagagtgaaatgacaagaacaagctagtcatgtaatcttctggggacagttttacaaataaaagtaaaaacaagtatgaaagccccaactaggaacaacttaaagtatgtaagaaaagcaaagacaggtaaagccaatgagccagtgaaggaaagtgaggtatgatgcagcctggagtcacagatcatttggcctgaaaaaggagttgaaatttagacattagatgaaaagactattctagccatcttgctactagatgatggtggcctgactaatgcatcacctgtgaaaatgaaaagacccatataaattcgggatacattttggaagtgaccctaagtaatccttcaattgttggggtgattatgtatgtttgtgttttaaagtgcggttcagtgagggatcagatgactcctaggtgtatttcgcttgaacaacaaggcatatactaatgatatctattgagaagaaacttcggcagaaattatgaactagaaaatggagaatggatagctctgttttggtcttgagaagtttgagatagctcttagacatcccagtggaaaggtcaagcagagggttttttacataaattaggagctcattgcagagatcaggattagagatatacatttgggattcatcagcatttagatggcattaaacgccacagtactgaatcaccttcagaaagattacagtctttcagaccagcatttggaagccaacagagcagaagtcagcaagaaaggccaagaagagcagtaggtatggaggagaacatagcatcatgatgccacagcagaaagtgtttgaagaagaaaagaactgtcaactttgtgacttgctaccgctgagtaaaaaaatgaggacagaaatgtgatcactggatttggcgcatagtgaccttggtaacagtctattcaatcaagaatggcaaatagcctggaagaaactgttgaggtcgatgcgtatgatacaatgaattaaaatacatcaatatttctagcaaagaaatactatcatttttacctatacttcaattcatccctgatttcatgaatatcacaatatagaatttggttataatttattgtttcatagcagttagttttttgaagctgtgaaaactcacaataattagcagcaaataattaatgtgcttataaaatactctggggaaatatgccctgacacttagtatcccaaatggcattactcttaaaagcaatacatgtgaccctctggctataatagtaaaaaataatttttaaaaatgaagaacaaagtaaactcttttaaagacttactttcaaatgtcacaatagcaataaattattgatttccacatctaaaattaatgtttttatttatttatttatttagttttttaattgatcgttcttggatgtttctcacagagggggacttggcagggtcataggacaacagtggagggaaggtcagcagataaacaagtgaacaaaggtctctggttttcctaggcagaggaccctgcggccttccgcagtgtttgtgtccctgggtacttgagattagggagtggtgatgactcttaacgagcatgctgccttcaagcatctgtttaacaaagcacatcttgcaccgcccttaatccatttaaccctgactggacacagcacatgtttcagagagcacaggtttgggggtaaggtcacagatcaacaggatcccaaggcagaagaatttttcttagtacagaacgaaatgaaaagtctcccacgtctacttctttccacacagacagggcaaccatccgatttctcaatcttttccccacctttccccgctttctattccacaaaaccgccattgtcatcatggcccgttctcaatgagctgttgggtacccctcccagacggggtggtggccgggcagaggggctcctcacttcccagtaggggcggccgggcagaggcacccctcacctcccggacggggcggccgggcagaggcacccctcacctcccggacggggcggctggccgggcggggggctgaccccccccacctccctcccggacggggcggctggccgggagggggctgaaccccccgcctccctcccagatggggcggctggcctggcgggggctgacccccacctccctcccagacggggtggctgccgggcggaggggctcctcacttctcagacggggcggctgccgggcggaggggctcctcacttctcagacggggcggttgccaggcggagggtctcctcccttctcagacggggcggctgggcagagacgctcctcacctcccagacggggtcgcggccgggcagaggcgctccttacatcccagacagggcggtggggcaaaggcgctccccacatctcagaagatgggtggccgggcagagacactcctcacttcctagatgggatggcggccgggaagaggtgctcctcacttcctagatgggatggcggccgggcagagaccctcctcactttccagactgggcagccaggcagaggggctcctcatgtcccagacgataggcggccaggcagagacgctcctcacttcccagacggggtggcggccaggcagaggctgcactctcggcactttgggaggccaaggcaggcggctgggaggtggaggttgtagcgagccaagatcacgccactgcactccagcctgggcaccattgagcactgagtgaaccagacaccgtctgcaatcccggcacctcgggaggccgaggctggcggatcactcgcggttaggagctggagaccagcccagccaacacagcaaaaccccgtctccaccaaaaaaatacgaaaaccagtcaggcgtggtggcacgtgcctgcaatcgcaggcactcggcaggctgaggcaggagactcaggcagggaggttgcagtgagccgagatggcagcagtacagtccagcttcggcttggcatcagagggagaccgtggaaagagagggagagggagaccgtggggagagggagaccgtggggagagggagagggagagggagagggagaggggtaattttgtatttttagtagagatggggtttctccatgttgatcaggacagtcaaactcccaaactcaggtgatccgcccgcctcgggctcccaaagtgcggggattacaggcatgagccactgtgcccggctaactcaggatttttccctttgctgatgtagcctgacagcaggagggagcctataataatgagaaaggcgcgaatcaaaaacagcacagtggcaagtgcgatggccttataagggatcttaggaggggttttcttaaactgaaggtccatgtagccatcgtctgtgctggagagccttgaatatttcactttactactggggattccagtagccaggttggtacgggacggcatcataacaggctgacacagcggagcgccgcgccaggccgcccgcacacccagagctcgcccacggttggcagcgcccaaggttgcacggcatggcccgcttaagtgccactcagccctaatgtttttatttatgaagtaacttaacttttggtaacataatatataacttctctttcacagattattttatttttttagaattctagagtttgaatgaatccaattaagtgtgctctgtgtgtcttctcagcctgcccttagcaagactcacaatgtgagttctgttctacttgctatcaggagaaaccgcacaggaacccaaagaatactgcctgctggaaaaaaaaaaaaaaaaaaaaaaaaaaaaaaagctcatttcttcacaaagtctctggctgtggcaaatagaacacaccatccgtttatagagtctgctaattggcactagggcattgtctgggcttgcacttctttactggcaaatgcagctcatttttatttatgctcttcaatagattcagctaccaatacatacagatttggattatgaaaaattatctaggcaggtaaaaggaattgaaatttcagacagttcagtggattaggagggagggtgaggtaggcccaaactaccttgaagaaggagtattttgtgaaaatgagccaagccccatgttcacttttgaataataaaaacactcatccacatgccgacatgacacagggattttattgtgaattgtcacacacggtagttttattagtacctattcaacactaagctaatttaaaagcacttgaaaccttgggcagacgtttttaaatgaaaaaaaaaaaagttcaaaaagctctgcatcatatactatctactataaataaaataagactcagttcttctgagccctgaaacacattcatttccacatgagctgcctgcaccaaggatcactttcatcattctctagggcaacacagttccctgttctgtcagaactttatggcattcacccttttgcctagttttcactgcttggtccatttataatacatctcctcccatactagattcctataagaggtctcatttaatttcttttaaaattaaattaatacaattaactttgaaaaactggtagtctttactaaatctcaacataagcatactccatggcctagacttttcactcttaagtatagacccagcagaaaaaacgacacacacatccaccaaaagacatgcactaaagtgttcgtagcagcgctatttatttgtattacttttatttttatgttttatttttgtgggcatatagtaggtgtatatgtttatgaggtacatgaaatgttttgatgcaggcatgcaatatgaaataagcacatcatggaaaatggggtctctgtctcctcaaacatttatcctttcggttacaaacaatccaattatactccttaagttatttataaatgtacaattaagttattaaaacaaatatgtgtggtcaaataaagagtagaatggataaaattctcacacaatggaaactgtaatacaatgagaatgaacaatctacaacttcatgcaacaaggataaatctcaataatagattgttgagccaaacatgtcaaataacagatcacagtgaattatttcattacataaagaacaaataccttatcctgactaatataccaggtctgagtaaaataattgggaaattttagccaatgtaaacatgtctaattccctttttataagtacaaaaccagtcacaattagactatgttcctagaagaaagtattagttatccttactgtgggagctaatgagtagagggggcttgaggggcttctgaaactctggtgttattcttgcatctgggtacagattacacaaatgtgttcagtttgtcaaagttcttcagagtgtataaatatgttaagatatgtacacatttctgtctttagaatacagtttgaaaacaattttaaaacccttaaatttctaaaacttgtttttaaaacatggacgttacacctaccctcatatttggactgaatttccagccttgtaacaagagagcattctccggaatatgaatagaactggtggcagactattcatgtcatgcgaacagttagtttgctttctaaactagattgtacttttcccaagagcaggagccatttcttttgtgtctgttcatgtgtctgttttgtgcacagatgcacagagaaacagcgttctgagtgacgctgattgttcacattgagtagcagtggcgggcaagcaaaaaagagcagggctgaaatttggaaggctttaaataataactggtttccaagtttggatgccatcttctaggcaacagtcaactgtaaagattttgagtgaggcaataacataaggaaaatattattttaggcatgcatacgtactagaatcgagaaaatcaatgccagcagaccagtcagcaggcttagtttaagcctaaactagaatgatcctggcaccaatggaaaagagggatgggcatatatgaaaaaaagtcagacaaaaataatctatagagctttgaaagtgatagaggtcaagagagttgtaagttctaaagtgattgagttttgcagactgagtgagagcttaatagaggaaggaaaaccttatggattaattgatttgggaagacactgaaaaaatgacataatgggccaggtgcggtggctcacacctgtaatcctagcattttgggagtccacggtgggccgatcacctgtgggtcaggagttcgagatccacctggccaacatggcgaaacctcatctctactaaaaatgtaaaaatcagccaggcatggtggcaggcacctgtaatcacagctactccagagggtgaggcagggggaactgcttgaacccagtaggcagaggttgcagtgagccaatgtcgcaccactgcactccaactccagcttgggcgacagagtgagatcccgtctcaaaaacaaacaaacaaacaaacaaaaagacataacgaatagccaaagttggagctcaatgcagaactcatacaaagtacaggactcagatttcatatattaaatgtttctgttttcctcagggtattaaaaatactaaagaggcacagagatatagtgagaaagcatgagaagatttagaaatgctaaacatcatcaaaattaaaaacactatttctgtgaaaggatagactgagaggaaaatattttcaaatcacaaatctgacaaaagacttgaattcagactatataaggaattctcaaatgtcaacattcagaaaacctacaaatcaatttaaaagtggacaaaataattaaacagacacttcaccaaacaggctatatgggggcaaataaacacaggaaaaaaagtttagcattagtcatcagcaaaatgcaaaataacaccacaatgaaatgcaaattaacaccatgttctatacatatattacaatgaataaaatgaaaaacactgatagtaccaagtcccgacaaagatgtggaacaactagaactctaacacattgctggtgagaatgcaaaatggtacagttcctctggaaaacagtttggcagtatcctataaaattaaatatatacttaccatatgtccccaagattctacttttagatgtttatccaagaaaaatgaaagcatgtatccagagaaagatttgtatatgaatgtttacagttgttctatttataaatttatcaggtacatggataaacatactgtggtacctccctacaatggaataatacataccaataaaaaggagcaatctatttacagagagaacttgcatatatctcaaaggtcaagctgacagaaacaagctagtctcaaacagttccacatgttatgattacatttatacgacattctcaaagagacaaaactatagttacagagaaatggtcagtggatgccatgggtaaaggtgggagaagagtatatctacaaaaggacagcaagaggaagtattgttgggcattggaactgttcttgtatcctgactgtagtggtggttatacaaaactgcacgtgttaaaattcacagaacttcatataccactcaaaaagtcaattttcttatatgttaatttaaaaaaatcttctaaggaaatgcacagatagaacataaagcaaccatttaaatgtcagtattcttttgtatttttactgttatttatctaagagtatctaaaaattccacagtaataggacaagtaacttactagatactccagtatgcctataaaaattacataaaaacaaatttaagaaattgaacttttttgccaaacaactgaaatttaatttataccagattatacaaaatacttaatgtaaaactagttaccaaacctaattagcaaatgtacagtaattgacctaattggcaaatttcttattatttattgagatcactgactacccagctgggcttactaaaaaactgagaagtagtcaaaagactaaagaaaaaaaatccaaatatattgaacatgggagggattttgctcttaaatttaagattctctgtaatcaactgtgaaaatctgaatacatttgttttctaggtgaacaagggacaataataaatcataactgtcaattttgctcaaaatatggtttaggagtacattttggacttctcaggcagttaattggttttgcagttttgaaggatgtggtgctcagtttttgaggggttgaaaacaactcaactgctagaatttcaggaggaaaacaataactataacaaaattcacagtggctttttaactaaggtgacttttttggaaagttaccctaaatgatctgaccagtttcatgtatcataatgattttgaattgagataagaataattggtacgtgatctcagaaaatctgaatttgaaggacgccaataacaaactagataaccactggcaaattagtaaacctctttgatcctcagtttactcatttgtaaaataaactatctgtattagataagaagttctaatctttactatattacatatatctctgtgtgcgtatcttagattcctaagcagggcccaacccaggtctgagttggggctcaggggtgcatcattgtaataggagcctttgtggtgctgaggcagatggtccttagtgcacgcctttagaaacactggaccagagagacagtccctcactcttgcagctttaacacttgaatgcagtcagtgtcttcttagcctacttttgtgtcatccctcttttctctttagcagagaccagactattagatttgtcttctttcatatcagaaaggcaaagaaattactatggttttccttagacctgtattttctgagaataatatagacaacctcagacagcccagggtgagcttccttttcaaaactgctttcagatgggatgtcttctacctcgtaggttcaccttccctgtaatttctgtaattcaaacaggcctcataaaccacaactgatctttaagaagtcacctttcagattgtctcccaaaaaaaatttaaactcctaagtgaaagatgaagtaatatgatataaaagaaaatctaatgatacccttaaaataagattttactcaggcaaactaaaaggcctactaaagaaaattatctttgacctttactttcgatttcttatgtaatcctacccagttgcttttccaacaataagagaaaaattacatttaaaaatattttgatatttatttaagggaattctactattggctctcaaaggaagttttaattttatttgaaaggcaaagcaaattttagattaatcttagcctctgagtttaaaaatgcaaatgtttccaataataatgataattgacatgccagcacatgacatttgctttgagaatattaaagctgaggaaatatggatataaacattcaacattaaactttgagataattatattaatcctaaatgaataataattcttcaaaaataaaaataatctttaaatgctaaaagaatcaacataatcacatttatttatgctatgcaagtatacatactgtgtggaagaatccagaagcagggttgatacctgacactctagccagaatctgatgagactgatagtttggaactcagtccctttccttacaaactaggttgtcttgggcaagtaatttaactttgctgagcctcattttctaaatctataaaataataacaacctatcaaatctttctgcattaatcacatgttaaatgaggataaagacaccttttaattagaattttcaaatatctaaactgtggtgcttgcaaagtttcacattcttttcacgtttgtaaaattgaaaacattttactagtccccataaatctgaaaaagaatttctaattctagttttcgaaattcaaaagaaaaagaggcacgtttctgtcttattaatgtatggttttcttcttgttttccttcgacggtcgtctgtaacctcccttttgttttgtttaggtttttaatcgacaaataataattttacttatttatagggtacaatgtgttgttttgatgtatgattaaatcagggtaattaacaaatccaatgcttcatatacttaccatttttttgtggtaaaaacatttaaaatctacccccttagcaattttgaaatatacagtgcattatgatttattatagtcagcattctgtacagtaaatcactaaagcttatttcttctatctatggaaactttgtactctttaatcaacattccccttttgccatccaactccccacctccagcctctggtaaccaccattctactctttatgacttcaccttttttagattccacccgtaagtgagatcatgcagtatttgtccttttacacctagcttatttcacttagcatagtgtcccccgatttcatccaagttgtcaaaaatgacaggatttcctccccttttaaggctgaatagtatttcattatgcatatataccacatttttttaatccatttatcagttgatggacacccaggttgcttccatgtaatcttgacctaagttacaaatttgcgaactctttagattcttatatccttagtatatgagaaatatttaaatcaataaagcatcataattgtaaaaaaaaaaaaaaaacagaagaacaaatatgactgtggcagcatcaatagaaaccaattggtttgtgtaaattaaaaaaaaaatcagataaaactgaaatcagtcacttagaacaatattttaaaatcagtatcctgagcatatggtcatgtctgggttttcatttccaaaagagtaaatccctgaagatactttgcatatttttatcctctcagttagactttgctctttaaaataaaacctaccctggttaacaccgtatctccagagaaaaacacaatgcctgctacttaataggtgttaactttttatgtaattgatgaatgaaccaatgaaaaatgtataataattcttaagaaacaacaagtagtgttatctactcatagccaagtgaaaggacaactaaatattctgaagaatagcgcaaaaattgtgcttacccctttaaaatacaagtgatatcaatcgtttactagttccaaacaaagcactttctttgcatttgcttgaggcagtagagcataatggtttggggcaggcatactttttgggtcagatgagaatgggttagaatccaggctgtccttataaacaccattaacttgggcaagtactttcatttgttgagactcattttctttcttgcaaaactgggaaaatcaattttaacttatgacgctactgaaagatttaaatggcaacattttactggctatttgttaagttgcatacctgagaggactcctagccctaagagtgaaaaattaaatcaatattatttctgaacaactttacttaacaattataagagctgagtaagaaagaaagaaaatttgtattatatgagatgcatacaaaatattttagcataaaccagaaatatttttgcataagccaagaaaagagacaaaatgttaacagatttaagtggttagaaatgtgcttgacattcatgaaaatgcagtattccttatacaaaaataacaatttagttttattaggaaatacagaaaacttgaatagaaatctatttcagaaatacactcagaaatacttaaatatgaatccacagtgagctgatttattttgggcattaattaggtattctattacattatcaatcttttgatattctgcattgctggcctcataagactgttgcctgagtgaaacacatctaaagactacctcaatctaccttaaagttaaggagtagcagagaacaaatggctgaataaagagctcctcacattttataaaacatttcattgtctactgcaagctacttagctcaatttaaatactgaaatccatctttagccttccaaattatgtttcttatcagcaatgttagtgtaggtattactctgaaaactattataaacagtgtaaaaaatatgtatgtaagtcatgaaaatcattctgtttcccataatgaaatcaaaagctcattgcgtgtggatgaaagaaaaaattgagagaacagagagatggttttaaggaatattttggtgatactgcaaaccaacatgtaatgttttaaatttatcattaattcttcttgatattgcttagaattccagccatgtaggacctaaaagaattgttctgggttgaattgtggcaccccctcagagagtatgctataagcctaaccctcagaacttcagaatgtgaccttatatggaaataacgtctctacaaatgttaaaatgaggtcatttgtgtgggctccaatccagtatgactggcgtctttataaaaaggtgaaatttggtcacagggacagacatgcacagaaagaagatattgtgaagacacaccgggagaagctggctgtatgactagagtgacgcatctgcaagtgaaagaacaccaaggaccaccagggaaaaccagaagttaaaagaagcagagaataatcatcctagagtcatcagagggagcactgccctgtcagtaccatgatttcagacgtctatcctccagaaccgagacaataaatgtcaataaaccaccaatgtcttcaaactttggtactgaagccctaggaaactaacacagggacattccagagcttacagtcccataagccaaaacactgaggtgaaaaaaggtgaaatcttgctgaccaagatcttacagttacttcagacagaactctagaatcaagagcctggttttcttgactttaagtttaggcctgtcatttccccttggagaactgacagattggaaatgctaaattttaaaaaagttcatcaagttaattcctttaagctattttatttagtgacttctgtttaaactaaaaataaatactgtgactctgcccttttgatttttttctaagtagccatgctccaatttctgaagcctttttaatctaaaagataaaattgaaattcttattaacttagttgatacttcatttttatctcatgatccctttactattacatgcaagaggatgtgaaatttaaaaactatgattaaaattttacaacaaaaactatgaggaaaaggaaagtgtcataaaataccatcagttattttagttaaatagtcattttctcataatgtttgaattattgtaacctcccctaaggtatcaatatttttaacacacagatatcacggaacatctcctttctgatgttacttgtaggaacaattatttatttaactaatttttgaaaccgatgaggccagagaaagatcttcatgcatctttgcatctctagcatctagggccacaccaaacacaaagttggtgttccataaaggatgaataatacatcaattcaacaagtatctatttatcagatactatgagctagacagtcctctatatgctgagtataggataataaagaaaacacataagaatgcttgtcattattgagcttatgttctagtgagtacagacagagaagaaataagataattaaattagacggtatattggaaagtaattctcctcagaactaaggagaaaaataaggcggggagcaaaatttagggaatatggttgttgctattttaagtagggtgggaggggaaggttgtagaatttcaacttgacatttgacacttgagcaaaatattaaagaatgtttcagcatggctgaaagctttaaatcctagttgtgtcttttcacttctaataaataagaggacactgattcccagtgtacccaggatggtcctacttttacatgtatttaatcctagtttaactattaataactcctcctgtaattcttactggaatctcagattgaatgatatatagtctcattatttagatcattatctctacataatagttacaaatgtttgttaaatgaatgagtttttaaaaaggtatatctcagtctcacattttatcatttttatttgtcaagctgtttaaccactttaagcagcaactttgccatcaatctcaaaaccgtgaaaccaagattgatgctgggagagtcttttaatatccttaggtgaaaaactcaaaagatacacttatgattaacatcaacaataacaattttctctcactatgtaagttttatttagtatcccccttgtctttcatttcaccgctgagacgaacatctttatagaggtccagatggtgcagagagattatgacaatgaaaagtagctcatgctgagggcctcaaggaaaaacacgtctcggcttgcctgacagaccaatttcaattacgtacttactatgcccctcaacagctgaggtgctccctcttaccatgccttgtgcaacttcggataacacctgaggggattcatggttacacacaaaagagaagcgacatggacaagtaaaattcttcctactttacataagtgatgccacacccattttagaaataggggattcatcacaaatgatccactctatagaaatctcatgttttctgagagtaaatcttaagagaggacttcagggttccttgttatgaggacattttgaaacatcacgtgtttgtcaggctggcccaaacaatttctacaggcaggttgtcagaagaagatgccttcacctcagatgtgtaacgcttacttccctcaacccccatttcagtttcagaaagaagtgctaattagaactggggtagcttttgcgagtctgcataaattcagctatgtcaacgttgcttctgcccctctgcaaagtggaaaacagtgatgttctacataccatgttaatgtagaaataacttctatgctcatttagccacttcagcacatccaggaaaatgacattatgaatgagctacattacctagaggaaagagacagactaaatgtggacttctatacaacttaatatgcatctaatgtacaacttaagcagtatcttccacactaaatgacaggcaagttatctccatacatcagtatatgttaaggacatgacacagctttattgttgaaggaatttgaaatttccagccatacctggattttcctatatccatttattagtcagctacttgcagaagtcaaagtaattgccacattcattactgtgtttgcctccatttaatcagttttgcttaagcttctcctatcctcctctggaatccagacaagcaaaggccactatcaaaaagtgacaatgttacatatgtatacgtatgtgtgcacattttgccactgctaaaatccctttatttgcgttatgtaaatgacctacgttagtcacaggacatttacctcaatttaatatctgttatttagagtgcttgtttctggcaagacaaatgtcaacagtttttgaaaactaagcactgtttattgtttagctggcagttataaataaccacatctaacatttctgttatgtctttgggaaaaaaaattgtaatttttgtaaaccaaagtgtttcacgagaaattgccacagattattccataagatctttctttatatttccagctcccattctctcctcttgtattacataactatttactagccctacaatgcacatatctgatattgaacttactgaattatagtctggtgagttgaataaattctttgtcatttttggaaggaacaaagtctgtgtatgcattgacacacctaagtttcattaaccaacaaacaaaattatatgcaaagtgtctttcattttgactacataatatcaaataactagcttgaatgaattttatagccccaactggacatcatctccatttacagaagccatgtgggtcaagtacccagcatctttctgggcacctcatctgtgagtggacaggttacctgtcaccagcaaaaatgcttaccaattattaaccttccattaaatcatcacccaacacttggccctattgtaattacccccttcaaatggcttttctattactatttaaggtctgatttagatcacagatatgtgttaatatatccatatctgggaacagtgaggagcagaaggaaaaacataggctaacaattaatggagggaagaatgtgtcttaggcaatttcttagatcatctttagagaatacaggacaactgtaagtaaattacacattgtacagcattgaaaagtccttggatttgactctataaggaaaccacagtacactcattaagttagcaccaaacagttatgggatccaagtcaaaattatataataaaggatgaatacaacaatggcattcagggtgtcagcattggaaatatctgctttagcgtctaaatatttatttgctatacctgggaactaatctgatatccatttgtgtagtttgatcaatttgtctgtgagtaataaattagtaacccactacaaactagaaaaaagtgtacataaatgacccccaaagtggttgacctctacatgttcatgggatgacttttcatagaaccccttcaattatcacattggtattagcaagaccaatatttttatttacagattttcatgtaagtgtgcattccctcccttttatgtagcagacattttatcctggctagaaaatcaggttttttagacactgtaattgttctagtcttaagattacagaataggattatacagtatacaaacgtactgttaaaaggattttatgcttattcctatcccctcggtatttaataagagagaatccaaatcatttacagatgtctgtgggtagtaaagaaaaagtctatgtgtatagtactcattatcgctaaagaaaaataaacagatctgtgagcgagaaggcagggaagatgctggctacctggaatataagacagacacatactgagacctggacccagggacaagaaaccttagttcattcaagctcctgtcttcctggaagggatatccctatggctcttcttccacaagccattattccacaaacaattaactcctttaattaaaacatttttcctccaatggagactttgcaaaaatgttgaaaatctcaagaatttaaacctgaacagaaggtacaatatttttcaatatattaaattcttgctcctgttgtttaagtctagttttcctgatagaaaaaaacaactggatcaaagaaaatgagatagtaatggaggaaagtgatattttggttttgaaataaagatgagagactttcctttttcataaggactttagacttttcccctagtaacctaaaatacacctttgccttttatggaattgtcccacttgccatttcatttcacttcatttcatttcatttcattggtaatgggtggaagcccatgcagtggtaattgccagtgagaactgaaactacctatccgccatccaggttactgtttacattaacacacatttactatttcattgctctcattggtataacaactattctaggagagccatgcccaggtaaacaacttgatggttaattacagaaaactcccaaaagactcatcaagactgcagtaggaagtatcaaccaacagtttatgccctaaaacttctctgaaccccttccctcaaacgtctcacaatgctatttccaccaatcctaactgttacatcaggatcattatccaatctcaaccaaaccctaacataaaaaggtcagccttaaaccaaacttccaactgtcaatttattctgattctgcctttactcttctgagaccttgccacagcctggtctaggtggtcactctcactgaaggaagcaatgtgtcgtgagaaacacgctcacctgtccaaacccaaagaatggacctggaggcacgaagaacagcgaaagtgagacttttaatactagtcttgcaagatcgggtgtctggtgagcaggcacatccaggcagtcacaacaggtaatttatctcctagcacataagtccttcccccagttcctcactaatcaagtactatggcgttacaatcttcccggacgtcacctaagtttcattatcccccttgtaaggttataccctgctccacttctccgcttaaattttgatttcccaataacaaaactttcttcccttttataggctgacccttcgtctacattctgttcacttatggtgaccttctaggtgcatgaccatgtggtttgttacatttgcaggctggctgccagtatttagatatatcatgccttgaaaatggaccattgaaattatattctcacatgtactcagtttgtcttatcaatatttcgtataggtggtatttggggagcagccttttgacatcatccatttcttacaaaaagagaagtgtgtgcagattagtgggaaagactgttctagtaaaaagtatacatcatattatgataatccttcctgaaggaaatttaacctctggtttcagacgccacccaggttttcctgctttttcgaatagtcggttcgtcattcctcacgtaaggaaagtggtaaacacactaccagaggccagagcaagtatcatggaatggaaagttataggagagtcatttaataaacatattcactgcatagtgtggtttagccatcctcagctaatcattttttttttttgaagcagaggcttattctgttgttcaggctggagtgcagtggcgtgatcacagttcattgcagtctcgacttgccaggctcaagctatcctcccacctcagcctctcaagtagctgggaccacaggtgcacatcatctcacctagctaattttcaaaaattcttttgtgtagataggctcccccatattgcccaggctggtcttgaactcctaggttcaagtgatcctccctcatcagcctcccaaagtgccaggattaccatgcctggctctcaactaatctctgaatttaaaaaattgcctctgagaaaagtaagggagagttctctattttgtatggatccagagaatcatttcaggcatcaacataataccaagaagaaccaagccacaaaaccattatgataatgagctaccatctacgaacacttactatttattgagtacttactataatccaggcaattagaatatactgtcactcttaatcttcacatcagtcttatctggtagatgttatcgtctcaattttcaaaagaagaaaatgcttcagataggttagggaaccatccctgaccacacaaactaaaactcctctattccaatcatcctctattgaaacgtaatgacttactttcttcatggcgtttttcaccatctgaaattagcctgttcatttattcacttgttaactctctgtttttccctcacaaatttaaagttcagattaggaacctcaccatctatctacctctctaactctactgcctagagtggtacctggaatatggtggatgctcgatctatgtcaagtgatacagtagcatattccacaaagaagcaagggctgaaatatgtgtttaaaaatttccccacataattctgatatgcttacctccctccccaccacagatatgtctgatataaatatctacgctgacacactgaaggaaaaataaggctttttgaatttttatattttctgagggaaaaaaaaccagaaaatttatgtgaaagctcactttgactgacaaaagtgatgattctctagcaatagcacagcccatgaatttgttagcttgcaatcaactgctaatagcacatttcagtattgctgactggctttagagattactgtttctgtgttgtttttcacattaaaatttcttttctagcatcagacagtgagttactagctatagggagtaaaaggcaggagtagaggaggtctgtagaatcaacttaaaaaattttttttcattgatttagtcagtaattccatacattttttctgaaccacgggtgaccttcatacacaaccaccaggttgttcattttgttttgtgttttagagcatcagtaaaacatacatggtcttactgaattctcagcaactaaagccaccacagatctgccttgaatcggtattctcaaagtgtcaggtgtaaggctagaagagaaggaatgctcctcactccaatcaatttgctcattcaaatcaatctactgcactcgccagccagttaacaacctctgggtcggcaagcaagactttttttttttcttgcttttaagatgtgaatcctgtggtatatttagctcatgctactgtgtttgtcttactgtctctcagaaatgtctttaccctttaaaagatccataaacattttcagaaatatggtggcaataaatagatcttacaccataaaaggcattctaaagaaatagcatagaccaacaaaaacagttcaaaaaaatattttctgggagcagttgtaccatggaattcctcaaattgtttttactacaaaagcaacaattcaaaaccaaattgcaattcaagataaaaatatgagtgatttatgattccctctctaggagaggaaaaatatctttcctttatccttcctttggttcatggccaagcccctataacaaaagacggattaaaaagagaaaagcatataaatttattttacagaagttttttgtggcatgaaaagtttcataacgaaataatgaccttaagaaacaggcaatcctacaatttttaagctagttttgataaacaaatggatagtcatggaaaagaatgattggataaaaagtatgctctagtggtaataaactgggagaaacttagtaagacctgtcggatcagattcttctctgtaacctttgccaaagataaggaggaacttatattctcggtattggcaaggtatctctgacatgagggtcttgtgacatgcatcagggggaggtgagaaaatccttcctaggttttgtggcctgcttcaagagacaagggaaggagaaggtcagagcatgaccttcctacttcagtgttctttttttattattattatttttactttttcaaattccttcttaaattattttaaagtaattgtgaccagaaccccatcacctcacttaaaaacatctggaaactggcgtttagagggatatatcatccgtcaaggtcagaggccaaacaggtttctgaataaagctggattgaaactaggtctgactgcaggggaaacaatactggagtgctgggaagggaagagtgtggtcgctttaaatgatacagaagcggggaagggaagtgctgggtagagaaaggccagtccctggctagggctccacccccacggacccaggtgagaacaggcatttcctgcccaaatgttgcatttcccaagactaccctggcccatcctgggcctataaaaaccggagaccctagcaggccaacacacagaagcggctggataccctgaggagcacatcagcagaagacgacacaagctgctggacggcgagagaacatcgagaggatgtccagggagcacgtcaagaggacgtggagggagtatgcaggtggaagagcacaccgacagacgtcggcacagcagccagccgtccaccatcgaaaggtggcggagtttggctggagcgaccagagaagagtccggctgcaaagcggcctgactccaggggaaaaccatctccctctggctcagccatcagctgagagctacttctactcaataaaacctgccactcattctcctagcccacatatgatccgattcttctggcacaccaaggcaagaaaccccaggatacagaaatccctctgtcggaaggggatctaatggatctggttaacacaagccgcctatagacggcaaactaagagagcatcatgtaacacacgcccactggggtttcaggagctgtgaatattcacccctagacactgccatggggtcagagccccacagcctgccagtctttatgcacccctagacgttcaaacagcagggcactgaagcagccagccacatccccatcgcacgccctgcgagggggacaagggaatctttcccatttcagaagctggattgaaactaggtctgattccagcaacaaagctccaagttgctggcactctctgccatttgtcctcctaatgtctatgctccctaggaaagttattctccaatgggtcaaagttatcatctagtgtgtacatgttcagaaaagctaatgacatatgttagcggagctgccccctacagctctgcttcggtttgggaggcaattggttgctttgctatttaccaacaatttcagaggcgggagagaagtttgaaggatttctaagggatagtgagggatgaaataaaaacctgaaggaaaaaccctgtggggttttcagttaacattccaaaaataattcagagactaggactggaaaactttgtataatttattttgcttcaaattattatattttatgtctcttataccctaaaatgattaggaagaaacagctaatagaacaaatacaccaagactggtctttggatgtggcaaaaatgccagggtagtctcttccaattttgtacactcttggagggaaagaactccagggattagtgcataaactggctgctttaaggaggacaaaacaactgccaccctgggatttataggaagtgggcaaaggagaatgttaaagttgatccatgaggaacagatttgccttaacgaaagcaggtcccaggcgattccccacatacagcgccttctctgtccaactaacccatcactcacattgctattcttgacagaaatgtctgtctgtctttttttgtggttacaacattcttcaaagaccaactcaaatctctcctcctccagaaaactctgttgatcactctctaattgccagcatctccagaatgcttactgcctatatatcctgaactacgtaactcggaatttaattttataagtgggcaagaaggtcttaaccttcccttcaacttgaccaaacttcacacaggtttgttactgaccacaggcccttgatctcccttttctaagaggatttactttagaccacttggaattgtaaattctttctgtgttcccttaacacgtaaatcttctgctagactcctgtcagttttacaacccaggaatgtctttctcaaggtcctgggagccatcccttttgaaataaaatcttcaggaatgctactgttactatctcccagtcttagggtgaaggtaagagcctaacctctacaagcatcaattagcaaacacagatggcctcgtcaggatgaccaacgttacccaattaagttttctaatacttttccacttgctcaccccagttatcaataactcttcttttgtttcagcacagttcagttctctctctctctcctcttgcaatagtcttgatccctgttgcaataatcttaagtcttccttacccgcttgtccaggataacttctctttgatacactgataaattcagtagctatttcctgtgtgctatctttcttagaccggaatataagatcctgtaactattttaattgaataatgtggtctttctggaaacttctctgttaatatagtccctctcttcccctgtttactgcttctaccttccccagtacacacacacacatcattgacactttatgactgaattctaagttttttaaaaaatacgtatttgtccaggtgtggtgctcatacctgtaatcccaacactttcggagactgaggcaggaagatcgcttgagcccataagttgaagaccagcctaggcaacaaagtgagacctcacttctacaaaaattaaagaaaaattaaagaaaaaaaaatagccaggcatgatggtatatgcacctgtggtcccagccactggagaggctgaggcaggcagtaggatcacttgagcccaggcagttgcagctacagtgagctgtgattactgcactgcactccagcctgggcaacagagcaagacctgtctcgacagaaaaaaaaaaaaaaaaaaggtgttttgttgttgttgctgttgtttgtttgttttaaatacatatttggacctcccttctccactgctttttaacaaggtgctgagtggctaggaaacattcagtaaatactagtttccttggtggtcaaaatatttttcttctctggaactcagaaaatagattacagatgaaatatacgggataagtcagcctgtggtagtcacctctaatgactattttgactttctttcttgcttcagtcacagtaggctcagagtccttctcaacatcacatttcaggcagccagcaccacgctatcaaattccgcacataaattgaaacctactagcctttcttaaagatgcccttttaatctaaagaatatttgattttaaactctgttttttgatgagattcatcaccttcatgcttaaagagccatttattatttggtaagtaaactagttcacattccttttaaaaaatcaatatcaaagattaaactaaggtttttttttttccacacatttgagttgcgaaatcactggcagagggtgtctaaaatgaaatagaccaaaatatgctcaaaaacaacagatttttgttttcttgaaagacaagaactttcctagtcagtacatcttctaaaataaggcccttagaatgtgattgcctagaaaatattcactgcttttcttcttaaagtgttcattgttatttttgaagaaatgaagcagagtagaatgttaccagttttaatagccatcacttttactcatcatctttctaattcctagggttcaaaatataaaggaaagaataaaggaaccaccataatagattatgaaacatagagatgaccacggaaatggtcttctaagataaaaatacatgcaatgaataattgagggagaagagtcaccatgcagtcacttagtacacattgtttcctgccttaagaggagccataggtctaggcatttattccccccaaaagtgggggtgagggtgaggggtgagggtgacgggataagactggtttcaaggtaggtttctagttgattcaataaccaaggtaaacagagaaatgaggtgattcgagtttctcagggactctcaaagacaataatatttaggtaaacaagaaatatataagtgttttaaggttttcataatttctattgctttactatttttttaacccctggagtaagtgggggtgttgtctgtcttgctgcaatggcctcctctctctgaaaattgttgcctcttcccatccacatgttgtacacactaaggtgccaagtttgtaccttgacacctatctccagctactcctgtacatcaggatacacaactcactcaagatgaccaataccattttcagaaaatttgcaattgagtgtggcttgttagtttaaaataaacggataaattcctaagcagtgagacaaaatctaaatgcaacacacatggaaataaaacatacaggagagaccaaaaagggagaaaaaaaaatagaacaaaaacatggctgcccaaggttctcatcggcttttctgtcccttcatcaggccctcgaaaggacccttaaattctgtaagatacgcctgtgtcctcataattcattatttttgctaatggtaacataaatgactttctgtagttaaaaaggaaaaagagagtaagatactcttaatagtgcctttgtttttataggcagtaacaatagaaaacactccaaaggacgcgaatgtctttttagccacagaaaactgaaggagaaagctgtgctagcaatgatctgaaaggcaagggacacaggtggaaggccagatggttgttgccagaaggggagaaaatgggccaagttcttgatacccttgggatatagagatgcaaggtgaatagaatgttggccaggagacacaactggccccaaaggatttgaccaggcaaaaggcactagtcactcatagctttacactatgacagttgaaatgctttttaaatgggttctagaatgttatacatggagaaaatctactctttcccctatcaggcaaaaaaggcaagagggaaacaactttaagcaagaatgaaaatgattttttcctctgactaattgaattttgaggagccttgaatgtccctcttatttcattttcttttgttgttacgttaaaataatcaaaaaatagttttttaaagtttaaaatatgtctgcctgtttactcagaccccaatggagggtcatatttctgtcaattctttgattgtcaaaaagagtcaggttctggtacaagatctttaacaactgaattactctgaattctgttttactgcttaagaaggatggttatatttgtctttcatagaatctcagagttggaaaaaatcttagaaaatgtcaaatttaatttctcattcatatatacacactacctgtgtcagtactttcttgatatttttccttaagtagactcagtttttacctcttaataggaatttaatagaaaatcaataacatgaactaaaaaccagtagcatatttcagaaatagaaagtattcatttaagaaaatgttcatctgaatatcacctaaaatcaactggcatacacatattaatgataacattttagttgaaatagagtcctttcctcttgccatctaacaaggatatcatgaaaggctttgtaaaatattgtgctaagaagcagacagctgttaatcccaaaactcttcactctaaatggaaatctctttcatctaacttggcatgttcttagtaaatacaccttaattcactctcagtgtccactattgaagaccacatatacccaggaagatgctgtgacacatgtaagaggagcagttctttgtagaataaatgctttgtaatgattttattctctgctatctgaggactatctgtatatattgactacttgcacaaacgaaacttttacacattctatatgctcacatttcttcaacatcttactgaacaaaacaatttcacagtaggataccagtgaggattttcataatgaaaatctgcatgagagcacagtaataacatgctataattgctcagagagaaataattcttcatgtccaagtttgccaatggcacactccattattatttgaagtggaacaggtcacttaaatttctctgtatccatgtcacaagtttcatttaagttgtgcgttttacttgcaaatttacaaagtgaaatatggtttattagaagagatagtactggaaattatttgtcagatgtcttttgtagtaacatttctattcacatcttagcttcatgcaaggaataggaccatataaaaataaagctagaacacaaatcatcacatattcatatgtcaggactctgagcttaaagaagaaatcccttttatatctgtgataaactcagatgtctagctttccctgcaaccatgcatatcccttactggataaattgctaaaagaggttccctatacaaattcttatccataaaagcaggcatcctaatctgtacttgtcactgttattttctttaatatgtaagtcaattatagcaagctttaaatggaacctaatgagaaattctcataattaaagagaaaacagtacaggaacttcctgccaatataaactgttaatttcgcaacacatgctccatagactttttccaatttctatattttattcacactgtgtgtttccccaaaataatgcttttaatgaaattttcccattgagtacaattttcttaatttaaatgataactacatttttaatctgaaacctctttaagatcctcattggcaaaagacaagattgagaatcacttccattttcaggaaattgtgtaaaatcagcatggcagatatagcaatagatgtttctctttattttccactttgagacctgggagcttattatttgaatagccatgaaaaacagaatggattaacaacaaaaaaagagatcatacacatttttcttatcagaagtcaaaatggtatttcacttaactggctaaaaatacggaatgtaacatctcatatattaatgcatcttcctgtaagatctgttccaatatctaagcatatccaaatgctaaaatccacagaacagtgcaaggaaaaaatactagtaaaacccaatggaaagctaccatcagaagctgagtgtattcatctagctttgcactgcagtaaagtacattccgtagagtacattctgaatagcaatagcctacctttaagctgcactgtcttacatatttcaaatcacactttgtttgaaagaacagactggttatttccaagatatctcatgaaaaacttattatagttcgaggaaaataagagttgaagccttggcggaatacccaaaggcattttgcttttctgactactattcaaatcttacttggcccaacttgacagccattctttctgacaacgttaagcggtttcagtaagtggtatgtaacctgcagttttctttcacttgggatactgtttatagctaattcaggcacaagggactagaaaacataatattttcataactataaattacttttatgtggtttctcaactactatgtagtgtaggatgatgtacaggagtggaagaaagaacaatgagcctggacaggtttttcaaatttgagcaacagaaacggatttaaaagacagattacagggtcctcactccagatatttgaattatgtgcagggcctgaaaacctgtgttttgaaaaatctctccaaattattcttatattggagtaccttctctagacacaccggggttgagattaactaccaaatattaatagtgtgtgactgttaagaggaagaacgtggtgcagtggggtggagtgtgggaggtggttcaagatataagggaagagaatatattactttatttattacttcattcagtcatttattacttcaagtagacttcataaagaaaactcactttgctttgaaagtatcttaaagtataaaaaaaactttaactttatacaagcaatgaacgtatgtttcaaatatgcaaattaaatattttaaatattccaaaaaaagtatccatcttaattttatcaaaaagaaaactgagactcaaagaattccactgacttgtccagaattacacagctaacaaggtcaattacaactaaaattcaaattcaattctgcaaaacttatggtctttgtaatactccatgctgcttccttcaaatagtaagttaatttatcttggcctcactttaccaatggccaaaatgaaagaatgtgccagaggttgagaaatgactaacccagtaattatttaaaacatccaagggaaggtgtatggcccaatagcaagatttggccgaaagaaagtaattaggaaaagaacttcttggaaatttaaaataatttttttctactttaaacaaatatccaaaataattttccttaatatttaaaaagaggaaaggacaaacattcattgaatatcttactatgtccactgactatcctatcctgcatgctatacttaaagtgtattatttgatttaatcctcaagacaaacctctaaatatagttgtactgaatacatcatacacgggaaaaagtacggttaaacaaattaatttgtcaacaattgaaacaaaaagtccatgttagaatctataccgccttcccttaaaatcctatgtctttctaatatagagaaagacaacatcatatgcaatgagcaacagaacacgagtagcctttttttttttttttccaccatggaaagccttggtttctaaaaatgcattgcatgagacctttgtaattatgcagaagacagctggttattctcagttttccctgaggaaagaatgggagataataaacttcaaccatacttgtgacatttagattactgggaaataatctttagaagtattgggcttctagaagtattaggcaacaagagcttttagagtcaactatggatgaggaccttcaggggattatcaccttaaaaatcctggatcatttctcacttactggtattactcatgcacacccctcctagcttgaaagcaagagaaagtctaaggagactgctcagcagcttgcagcactgtaaatttatgtgcaggcactttcaaaacaacttcagaaaacagatttccctttcaacttacttgtttttttcatttagtgtattctatcagagcaagtccaagacaaaagctttcccaagagaaaagctgagataaggaataatgtattcggtgaaaatatgtaagatttattctaggtttatcattcagaccaaacctagtatctataaattatccacatttccccctaaattttatatcatcacaaatgtacatcaaaacaggtattcctttttaattgtcgtgaaatatgttatctcaggcaagtgtaataacttgaaaaatattcatgatacttaattacttttgttctttaattcatttaacttccctctgagggtgttagcatttcctagtatttcagaacaatggtttacaagttgtcttccacagcaatatcacgttcccatgtaggaatccctatggacatgattagtttagatataaatgaggtttatcaggaataattcccagataactagctctagcctatcctattctcacagtaattgtcatatccagtgctccagataccacaagagacaaatgcccttttacattgctatcaagggccagtattctacatttatgtttagattaagttggctaaacttttgtatcagtgtaagtgctaacactgacgttttacagaagagcttgcattttagttgcatatgtattaaatgatttggagactattttaattactaagatgctttgttgagagattattttgatacatttacttcggggtaaagttgagctgtgtgccctctgagtcaatattaagaaaggagagaagaggggatttgatattgtcaggataaactaaaaaggaaagaagaaacttggttggggcaaggatagtggggtgggggaaatggtgaagggtcagttaaaaagccagtggtggctacatggctgggaaagaactttggtgagtagatgtgtctagcactatttttttatgtggttgatttgaggtgtgaaaaattagcttccacccctttcctttgtagaggatgatcactggtaaattatgtgtgactcactgatgcttttgtggaagtgaattctctttggagagcttaaacagaaaaatgaagaagcagttaacatctaggttttcgaagtatatactcagagatcaacatctttgaagaaagatatacaaagccattaatttctctagagagtgcttcatcatgccccatgagtttataattcttcaaggcctaggtcaaggtctattttctccaagaaactgtttctgattatccatccctcggtgatcttcctcccttatgtaaccctacaattctcacctcctgtgccttttaatttagcatctaatactgtaattcataaaaggcctaatcaaaatagattaaaaaaaacagacaatggaataaaattcagaccaaagcctagcaaccatcttattcattctgcatcggtactggctggtgacagcttacaccacctgctatacaatgatgcaatccaatgtgcgagaatctttttttgttacacctttacatgtgctttcaggtgttttggttacagctatgggtatcagaattttattgatgggtgagcattttcttttcctaagacctaaaagtagcaggggaaaaggctcagcatgttttacccaaatagattttttttttttccgaatggataaagacaaactttggagccaaatgcttcattgtttgtgcataaatctcaacaggctggttgaattaagctctacatattcatcaacaggcattgccaataaagacacaaatacaacaaattaatatttttcaaaactctgtgtcttcagaaaatttctatgaggctttgatgaacaaaacacaaacataagaagcaccaccattgtctcactgtttgggcgcaatcattctcaaggacatctgtgctgattccttttcaaacttggatggctgctatctgaatcaggcccagatgcttttgttggaaaaaaaaatctgaattttggggttttcatttaagttgagtaacagctttctccactcaaacatgcaatttattttacagtgtgagattaatagcaataattgcctgggaaataaagaagtcttgaagaaaaataccacatatcaaaaggctacttaaaaaaaaaatgcgggtctttgctcaagcaatgaagctatgcttcttatttgcaaatcattctattataacttcagtcatactatgcagactactttaaacatctgaaatttaacatctgaaatttaaacatctgaaaattttaagtttttaaatgaaaaatcaggagggttgatattaggcttgtaaatgtaatatttgcatttacatatttctatataaaattgcacaattttatctagaacagaacccacctggcagtcttaacacaataattatttgcctaggggcccagaaagtggccatcagtagagattcaatttttctgagatgaaactattgagtgaagtgcattccctccttgataggaagcccaactgagagataaagttttgatggattcattaacagcccggcctgtaaatctcatctccactgagattttaaagcaaatggcattattctttcattatgctgaggcccttactaccctgttccgagttggtatttgaacctaacggcctaagaatatttataaagtgaagaaaagtaagggtacatttttttttcctttattttttccctcaaggcttgtctcacaagtgcaattacctggctctgggtccaggaaagccaggtctcagcatacagaatacattcacactgtgtcttccagcaacccaccagacctctgcatttcccaaaccacagtacttctcaaaccagcacaccttggcagtgctagggggcagtgcacagaagccagatttggcaagagagaaaagggaaaatatttaagtgtcaatgtaaagccacagtacactgcatgattttattcagctcataaaagggttatttctaggagaagtaaggaattctgcaaacatataagacaaaatcagaatgaaatgattattcaaagaaacagaaggggtgcaaaaaaaagagatgtctcctaagtcttttttgaggggaaaagggagaaatctaataaatctaacagaaatgtttacaggttggttacaggtattttttttttttttgacagatgaacacattggaaaggtggtctgggacagatgtcaacaaaagggtttgccagtataatgactgcaaggtgcaactacagagtacccacagttctccatctcaagtaaatcaattcagccttgagaaactactttgacaattataaatataaatatatacacacacgcacatattatatacacacacacattatatacacacacacaattatgtttgtgtgtgtgtgtgtgtgtgtgtgtgtgcaaaatacccagaatgtcacttccctccccaaactgatatctgtatacatttctatgttgtattggatacatatttataaattcaaaatttggagatacatatttatggataaatacctatctctttgtaaactacaggcaccaatatagcagtttttaatcttttaaaatctagtttagcatggaaaattatcctcattcttgttctttctgaaaccctcttactttatatcatagtattttgatgaaaaagaatacaagaagatcataactctcaatcaatcaacaattatttggtggtgaccagtaatctgatcagccttgtgccagttgctttgttgataaaaggactcaaaaccactgtcctgacataaacaagataacaacatcagaaaaaaaaaaaattgtgaggtatgtcacttatctttctgggtctctacttgcttgatttttaagaatcatatacaaataacagcagcctcgtatttttattctgtttatagaaatcagagattatatatgattttagagaagggagaaattagaaaaaactctgtggtttgaggtgcgacctgcagaggtcctgacatgtggaagggttggggtgaaaagatgaaaggtgaaaggtcatttctgaccaggaaaacaacacattgcagaggcacagatctggaatttgtatagggcatgtgggcacttgggaagaggacattaaccagctcttatggaaaggagtagtttgcagaggcaaggctgagtcaggcagaggtagtcctagaaagccacacaggagtttagtttggatgcatgggcaagtcatgcatccattcattctacattcactgctcatttcctgagttcttcctctgtgccaggccatactgaaaagcgatgacccagagtgagagaggataggcatggtcccagaccacatgaagtagaatctaagactaaagtgccagatttaaaactgtatataagtgaagagtcttcacattcaacatgacatacttataaagattttaaaaaggtctttgatgtttcatagtatctaacgttgttgcctagttctctcaaagcataattaaaaatgtgattctcttgacatgttataagcaataaaatttggggagaggaggggatttctagatgtcaaagtaagtataaatgggcatagacatgattaggttaggctgaaaggttggttggtcattgtttacagttggtggtagaacatgccaagttagatgagtcccaaagagattttatagctatgagatatcatcttgtgtgttcctggctttcagattggtacttgtcaccatggaattctagagcagcaaggaagtgcagatcttattattttgagacagagtctctctgtctctcaacctggagtgcagtgagatgaccatagctcactgtagcctccatcttctgggctcaagccatcctcccacctcggccttccaaagtattgggattacaggcatgcgccaccacacccagctgccgtactttatttagtttcaaactctattttctgaatgatgaaggtggaattcaaattggtcaaggattttactaaagccacacagctggttagttggcaaatcctgagctaaaaataatgtatactgattcgtataaccacccccacctttaccaagtttgagatcagattttaagaggatgctgcaatctctattctcttcataaccagaggagcgtttagtccatggtcctggttcccacagtcaaactcttttggatctataatttatttgtgaatgaaaacaagccattacaaagtggcaataaagcaaatgtagggtgtggctatagcaataattaatcataatctcaggtcccaggtggttcatcttgagctgatatttttttcctactgtttgtgacatgatgaagatataaatagattttaagtttaaatggaaagcaaatccatttctctagcagttataagtgtattaatagattgtttagtcactcgaacatgtttataatctgttattttcttaagaaatactctcagggctgggtgcagtggctcacacctgtaatcccagcaatttgggaggctgaggtgggcagattacctgaggtcacgagttcaagaccagcctggccaacatggtgaaaccctgtctccactaaaaataaaaaaatcagccaggaatggtggtgggcgcctgtattcccagctacatgggaggctgaggcaggagaattgtttgaaccagggaggcagaggtttcagtgagcagagattgtgccactgcactctagcctagaggacaagagcgagattccatctcaaaaaaaaaaaaaaaaaattcatgctagtatagtaggaatcagttgcagagtcagggaagctaagctttgcaagaaaccttggaccatttttattcagtggtatcataaatttatttggaggtacgatactttagaatacacatatacacacacaaaacacatttgcttattatgtcagggggttcctacatcttttgaagtctctcttcagacccacccttagctaagaaaactgatttggtgcagtcatttaacttggtacatggatacatttctttcagcattaagtggtctaaggtcaactcatgtgtaggaaggtcctgagtcaggaaaggaggaatactagacacatcatgttcatttcaggtccaatcccattgcaacgctgggcaagataacttacagtctttggccctcaggttcttcctctgtaaaaaagataaatgatcacagtagtacatgactgctgtttattgagtacctactgtgttaatgctaggcactttacatatttgctttcaattactgctaatatcaatattttgtagtagacatgaatcaccttttcacagatgagaaaaccaaggattagaaatggaaatgtgcctcatatcacgaagtaaaaagatccaggatttgtaccatttgtctccaaaatgcatgtccttctctatgatatggaaattcctacttgtaaggaataaggcagcctcatttatctgcctacgtgaaaagagccttcaaaataatattataaaaaccagagtttcatatcaatgtgatatagttgagcatttttataattctagagaacagaatgaggcaggaatgagagggaatatgaagaaaaggataacaggataacattctttatgatggggtacctgatttttggtgtcactgactatcatatttggtaaggtagtttataaaggggtttagaaagttacactaacagcttagaagtccaataatattttccttctaaagtattcaaagaaagaacaatgagataactttaaggagagtaaactggcttttcagatgaactttctgaaatgattatcaaaaagagctctagttttcttatgtctaagataaattattacaccaccgcagcaatttcaggtctggactgcttcctgagtgtagccccaaataaaggtcctcaagacacttccaaatatgcaaatcagctgagtgggtttgtgtgtgtgttaaactgtattgagtttcagagtaaacctgcttcagagtcagctagggaaacaaaccacagtttgattttagcagagtgaaggacaagcacagtccatcccctttcacaccccatagcttcaccaggtatcagcacacagccctttaaagattaagctctaaatggccacactttttgagactttaataaaaaagctttttacagtatttctcctaaaaatgtctgaaaacaatttgttttcttgaagccaaagcacagaactacagcttcccctcctctccctattattgtgatttccaaatgaatggcattgagttgattgtttatcatgctggataatggcttaatttattacagaaaccctagtcagacattaaaaaactgtaaaagcccactgatctaccaaatccttttgagacatagggcctatgcgcattaaaaacctgctagaccatggtgagcctatgagataggaaacttttttgtctcattagcaccaggatttaaaaatacagcacctcctcaggttgaaatgccaagcttgagactgctgtgtgcagctgggtgtagaggacacctggataagtcttaatggtgtgtaaacagcaggattagtgtttctgagtctccgctgtgcagagattttccgttggcttactcaatttacacacaaaaggtcttaggttcctttgggaaaaaagtccagctagacaaagaaaggacagaggaccttttcctttcacagggtatttggattcatgcatgcattcatccatttaagaaatctttcccaaaacatcaactaagacccaggtactgtgctaggtatacagtggtaagcaaaatcagacatgtatctgatcatcataaaagctaaaaaagctgtgggtcaaacacacacatgaacttcagcctgatttcaagctccctgaatttataggaatgtcttatttatcttttcattttccaagagactagcagagtgacttataaataataggtgactaatacacataaaggtaatggaagtttttaaacaaagtgtgtatgattagttttaaagtagtaataataacaaccattgtcatttattgaaaccatactatgcagcaagcactgattactcgaaataatcttgaaataaattgataggagacatttaaaaatctatgtagaacccacaaccccccataatactgccatatcacaaaaaatattcatttctcctgcgaagctgaaggcattaagatgctgtgtgtactgatttttaagaaagtgtcccaaaatctctgggccttttccaaatgcctatgtgaacagaggagaaatttgcagtatctgtgagacgtcctttgaaacttggtttttgatgagtgcactgtgtccaaagcagtggttttcaggtatcaagaagcacccggaagaactgttataacacaaattgctgtgctacatctccagagattcagcaagtccagggtggggcctttctaacaagttctcagggaaggtcgatgctgacagtgtagggatcacattttgataacctgcctttataggatttcagtttcaaagtctgagtcctactatgagaaggctctctttaagaatgtataagaggaaaagagtgcgtgtgtgtgtatgcggtgagggggagaaaaatgaatggatgaaggcctcagaaaactctctgtggttcacctccatcccagaatgagcaattgtagttctagggtctacagacaggtgaaacgacagaagacagctaggaacagtgcaagaaatattcaggtattatctttcagcttgattactagaggataaagggaaaggaagctcttagactagaaatcccttgctatcctgtaatttatatttcattacaaaactaaagaataaaagtagtcttatccagagaggggaagtcagtccaaattctggagattcctaaaattagtgtgtgtctctgtgtgttaaatcatcccagttttataaaaaaggaattgaggctcaaagaggtcattttggaggatctccaggatcaaaaaggaagaacaccaaaagctgagtctggtccaggtctctctggttccagagtgtatttacccattggaattattctgtctctgccttctctaagtggctccaaatatataaatgtgtgtgtgtgtgtgtgtgtgtgtgtgtgtgtgtagtagcacctggcacacagtaattcccagtaagcatttgaaagttttttttttttttttttttttttttttggtggtgggggtagtagcacctggcacatagtaattaccagtaaacatttgatagtttttttttggtggtggggggatgtacatacatctactattaactgcttactgggaatgggaattactatgtgccaggtgctagtcatatttatattagctcatttaatcttaaaaacaatctgagaaggggatcttacagaatcccaattgtatagataaggaaatagaggattaaataaagtctcagaccttggagaacttgcaaaagaaaacaaacaacaaggacaaaaaaacgaactccaaaccaattttacctcagagctagaatttttcatgttttttctttcctaataccagctacctcccaccatttggccaaattggtctgtctctggctctttatttaattatgtttctacggaattagattatcagtatcaaatttaatatgtaaatgaaatatccaagaatataaagatttctactgttgaatatcaattattagagaaaaatgtgaagagttccaccacattgaaactgtggctaatggccacattagggatgatttatatctatattagagtttcagttaatgtgaaataaaatgtatccttagttttttccattctcaaaatgaaataaacctgaataaattattatgaattgtgtactatcttacgacagctttttgcagttaaattgattaattgttattatccaatgctgaaatcattttcttgtgataactgggcaagtgagttaaaattttctaaggagaccaaaggcaatccactctgacacaaggtgaatagttttaagctaaaggtgacttccttgcagtatccatggctgtcatgaaagtagatgttaaaatatcagatctatttaccctcttcttacttcacaaaacagaatgagttatatagttataatttacacgcctctttaagggcaagtacaatgccagtgctggtctgtactgacatagagataacactggttaacaacggaatgattatattataaaaagaaaggacaaaaaaattgggttagtattagagtttatggaactcagagaatgaggccaattcatgctactctggagaattccaaccagctacaagcacactttccttaaggaaaaaacaaaaactgggttataattcattaaacttggctccttgaggtctgatgagatgagcacagggaacctgctctcttagcacaatcactactaactgacaatgtagtcgagaacagggtctgtttccataatactctcttaagctgtttgctcccaatactcttttaataataatgaaataaactaccttctcaatttttcatttcagtgctaaaagttacttatatagttttctaaggaagttcaccatgagcattgagtttcagaggcatgttgaactttcttaggacatctcatgagctttttacttttgttttttcacttgatgcataaaacccctaacagatacagaatatattcttctttaaacatttctaagggccctcttcccatctcctatgtagtgacagggcaaaaacactgagtcctagatgctcatggcccctgattaagacctgtggttgggaattcatgggaccctatttaaaccacctgctttgatggctcattgaaatcagaaggagatttttactctctcactgacactgtataaatgttagttcactacagggaaatggttgagaggggacagacggagaactgtgaagaaattaaaggacctttaatggattaaaaacaaaaagccattctgctctccagggtgcacatttatttagttagattttcttaaaaatattctcaagcctccaagttcaatcgaccagaatgactttaaaaccttttttttttcctgctccattggagagatatgcctttacatgattactttaatgacaattatctatcaggtaattgcaatgtaaagctaatatgtaagtatggcagaacctgtgaattttacaagtctaatgtctccagggtattttaaaaagcactttggctacatttttaaatctaactaaccattccaacagacatgggagttactactcttgggcaacattcaaaagaatgggtaaagttaaaaagagtaattttctgaagtatttttgacagcaattaatttcacaggggatacattcatatcctaaatctccaggaaaaaatttttttcactgtagaacaagatgcactttttgaagagaaattcctttactagagtttatactttataatgacctgaactgtagaagaaatataattaagtggattcattactatttcttttaataaggtaacttaattgcattttccccaaaccgcagaaaatttacagttattgttcaggcctaaaaagaaatacagttaatcaacctatgtgtccatcactggatgaatggataaacaaaatattatatatatatatatatatatatatatatatatatatatatatatatgcatacacacacacaggaatactatgcagccataaaaagaatgaaatcatatattttgcaggaacatggttggaactggaagtctttatgtgaaacaattcagaaacagaaagtcaaatacttcatgttctcacctataagcgaaaggtaaataatgtgtatacatggacataaattgtggaataatagacactggtgactgggaagggtgggatggagggagggcgggagggggtgaacaatgagaacttacttaaatgggtacagtgtacattattcaggtgatggttatactaaaagcccagactccaccactatgcaatatatccctgtaccaaaactgcacttgtgttccttaaattgatacaaataaaaaaaattaacttcaaaagaattacagaaacagagttacagaaacaagttctatacataagcatattatcataatttattgttaaagaattaaaattattgtagacaattgatatttgtggtcttttaaacttgatattaaaaattgagatcaaaatttcagagagactcattgacagcattttatttccatgttggcaatagttctcttctcctaatggtcatttgaggaaacattggtttacctctttccccatctctctgtatacacttaaattcaaagtataaattgtaggattaccttaacattcaatgtatagtcagaaaagaaacataattaagaaatataaaagcttatcatcttgaaaaattagttcctaaatgccaacttggagattttaaactaattttaaggcaaaacaatgtaatacaaataaataacaaaagctgatattcttcagtatagaaatgccttcatgttcatagtccaatcctctttaggccttcagacacaatgccattgtgttttctcccttttttaaattcatgtgataatattgttttcttgctgacatgtgatctctttttataaggaaataattctttaagttcaataatgaagcaattaataacagtctgaaataatttagatggcattggtcctttcttctggaaaaacaaaccaattcattggaattctcttattcaaagttaaaaggctgaaattactatttatgtaataaaataatgagaaattaacaagcaataccttcacgatgacagaattattattactattgctgctactactgtaattctcaaaatttttccttagaaacaatttggaagaaaatgacacagttaaggtatcctgacttaaaagtaagtcaaaaaaataaaaaaaaaagatgactattaaagttttaatcactctgaggagagagaatggaaaaaaccacatagaagaatcaagctgaagatacaagttaaatcaaattttaaagaacattgatatgaagctgtgaccagttttagaggtttaattagtaaggtaattacatatagagctactgatgacacacagcctagaggttctatattaatgaaaattaactttaattatttaatttgtctaattaaaaggtagttatgtcactagattttgaattacattaagccaagtacaacacattacatccttgtgtccaccaaaacccaacacattcttagccctgttattaactcaacataagtgagttgatttgaaatttctagttaattgacaatttaaggcattaaagttgaaagactcaactaattaaatacatcattcatttattgaataaacagttgctgagcatctgctcagggctaaataccatgacaagtttggggaatgcaaaagttaataagacacttaaatgctttttggcttttaaaataacttattagaaactgtcatttctacattctaggtactcaataataatattgtaattggattctccagaattatcataattttgccaataggtaaataacattttctactcagagaaatctgtgttggcatatcaaatatgtgaaatttggagacaaataatataaaaatacattactctccaaattcctaaattatcaaatttcctagtataattattattcatttattataaaaccaaataaccataggtttaatcttttaaacttcacttacccaagcttaaatttctaccatagttcccacattgagtaaaatttagtcaatcattgagtcttcttttaagaggtgggtgctcgttatgttgtccaggctggtctctaactcctaagctcaagggatccccccgcctcagccttctgagtagctgggactaaaggcatgcaccaacacacatggcagtcaggtcttattttgtacccagacattctcaatggcttcctatgtagtcctaattacagctctgcatttgcaacttactattcttttgcataaatcttccagtttaagtttttcttgactctgtctccagaaattactttcctatcaccacacttttgagcttgtaacccatgtgttgccctattatcttcttcctttgcctccaatgatctaaatgttgcctggattcttggaaacattttcccctttcctggacttccaaaaagaagctcctcaccaccctttcaatttttcactcatcacatcccttttgcaggatgtcgtttgcaaaagaccatatgcaatctctatttagcatatacaatttatcatcaatatctcaagctctctgtggttaggacctatgtcttggacttctgcacaacatcctcagaagttactactctgctataaataaaatctcaatatatttcattgaataagttaacaatagtttttgaggtgctgtgggattttaaagtacattctgaacatatgtgcattgtaaaagtgttaatcacattttattgaaaaattaaaattatttgaaagtttcatttatcagtagcatataggataaatctttgttaatcagaaaagtctattaatcagatctagcattttgaattgttccgaaacaataaaaaatagagatctacggaatttatctgaagtttttgctcagtttattttcagtttatctttactgcaatcctaagcaagaatgctctcctattctctattatctttataatttatcaatttattatttaaaatgtcctattcctgtatgacattttacaaagctaaatgttttttctaaaaagccctatattctccactaattagctgacaattatatgatttatcatttttaatatggctttctttcaatttattcagataagcaggatctaacatgggcttataaggtgaacaaacgtagaaagttctaaaatattatgatctcccttcaagcaggactttataaatgtgtacaataaattatgctaagtaaatgagataattattcattcaatttaagagaaatatacaggcacaggccacattgttagatctagatatgtttaaggacatctctgctgctatattgtttctaatttcaaatgtatttaaattgacccttttttggtggagagtgttgggagaaaggagaaactcaaaacatgccgaggggtcactaaaagcatattaaggagcttcaaaattttcaagatgaatggtatagaaggatttctaagtttagaaaaattcacttagtttaagcagagatgtcacattcaatttcctcattcatccattggtctaaatatattaaacactcactacattccacatattaaaatttagagtattttaaagcccttggtatataatgttcctgttcagtgaagaactccattttcatttctaacaggtctaggatatgcttatgtattttaatgtaataaaactacttcattttccctgtagagaatttgaaatatttagagaaagtgtaagaaaaaaaattctcataacaaaccctactactcagagacaactacctttaactctttcacatatttcgccctccattctttttcccctttatgtgtgtgtatgcatgtgacataagttagttactcttttatatatttttcatatttcttctttatatataatgtgagtcatttcacagccactatcttcacggaacttacgattttgtgggagagagagatgtgagaccaaaagatgaactaaaatgtaatgtgtaataatggtgattgtacacagtataacccatgcctacacaagggcccatccatcagtctggtggagtgcagatatacgttgttgagctgagggttgaggagtgtggagtacttgcaggagctaggtgatggggatgttgaatggggagcgagtagtgatattgggtatttagggtctaaggcataccttggaggtggtagaaaactcgcagtagaatagcagagtaatgtttgggtataggagacaaagtagaggttgacggggctaccattttatgctaaatagtcaggtctttcctttaggccagggctcaagaaaataagaataaaataaaaataaaataaaataaaataatcactctcactggtttgttacacctgaaaatctcaggcctgatgcagtggctcactcttgtaatcccagcactttgggaggcaaaggtgcgaggaccacttgtggccagaagtttaagagcactctgggcaacaaaacaagatcttgtctctacaaaagaataaaaaataaaataaaaattaattagctgggtgtggtggtgcattcctgtagtcctagctacatgtagtgaagaatttacacggtcaacaatcaaaacttgagattgaagcaggaggatcatttgagttcaggagtagaggctgcagtgagctatgattgtaccactatactccaacctaggtggcaaagcaagaccctgtctctaaaaaagaaaatataatttcccactcccccatatgatgtctaaaagttagatcacagacactggaaccaaattactgacttagaattctagttccaccattcagtagctattgggtcatgagcacattaacctatctgtgcctcagtttctttataatgaagtaaccataatatctagcccttgaggctgttataaggatcaaatgagataacatttataaagccgtaagaatggtgactggcatataataacactatataaacggttgttaaataaaagcaatacccctgtaatatcaaaacaaacaaatcttgatagccaaaattcctgctacagaatagaattcatgtgctttggggtaattgctaatgcactgtatagttacttctaaagaatttcatgattataacattctataatgaatcaatataataatagcatttctatggattaatttaaaagattaagcatccaagctgattataattgagctcatttccagtctggttaattctggcagttttggagcagcagagtacttaggttctgagttatttttcattttgggcggggtggtttatgctctgaattaaccatgagctccactttagagaacttgaaaaaattgactttttagaatatttttggcagaatatacaaattgcttgataaactgcaaaagattgagtaatttttcaaaacacccagactgcacctgttagatcattattatttcagaaattccatattgtacattgaaaataacctcacaagtatattttctgtatttatggccaagagctggtcattggagatttatgatgctctgcaaaaaacaatgctgacctggcaagtgcctccagggaaggagttgctcagaaaccagtgaatgaaataaattgctattaattatggtactaagtcttaactccagcccaccccattggtttgtgacccaaatgtttttaaataccttaattcaatttataataatgctgcccaagggcaaccaatttgcctcatatggttttctaggacacaacgtagtattttggcacactgcacatgcttaaaaattatttgttaaattagttaaaaataaatcaaaccaaagtcatcaacaaagtctgtttcctattgagccatgaagtgttttgcaaagaatgactctcttgtcttagttcagatgccatcttgatttaggattttcacttatccaacttttcttacaaggaatagttaattccagttattatttccctagcaccgttatctcagatagtgtaaactgaatatcaacacatacatatatcatactatcaattctttgtcaggtacttgatacactttagatttaatcctgacaaccacactgttttaaaatgggcatttttccatctcttttttttatagatgaaaaacctgaggcaccaataggggtactggtcacacaaggagaaaggggagacttcaggattcttttcttctaaattaactttgaaatcgttttactgttagcatcacgttttgagaataatttttgataaatgtggtatgcttttatcctaaaaagtgtattttcatctccaaatgaaatagtagtaataaaagtaataaaactttttatttcatttttttctagcaagagatggtcttacttttacttccaacaggagaattcttagtcaaagaaaaataatctttaacacaattaacagaaaaaagttgaatctcatttcatttcctgtggggccctcccaggcctaccattaatactcattgctaccattttgcttttctttggtccattaagtaggctgacagtccttcatatttttatatactacgttgagaaatgggaattcctgtcaaatgtatcttacgaataagcattactataataaaattattaaatgggtagatttagatgctaaaactggtagaaccacaattacaaagtatgtaaaaaagccccatcagttgtccatacacaaaagtggtgttatatgttagtgaatataaaatattttatactagagcattctgctcccaggagttgtttttgttgtgttctactttgttttaaagagaaaattctctagtagtatcagactctcccccaggacaaactttcagtttgtttcttttgttgttttgagagaacatatttacaacttaattttcttaagaggggtacatttttttgacatcactatattacaatttgaatcaaaactaagatgttgaccatataacttcttcactgcatgtaagtatatcaaaacaccatgttgtatatcttaaatataaataaaaacaaataaaacctagtataccaaatatggagatactaagattctactaatgtacactctccaaccatgagacaatccatctaaagatgaaagatgagtaacatatattagttcctcaatatattttagcaattattattattattactattcttattactatatattcaaatctttatcctaaaatccagccatttttctccaatgcttttctttttatggttttcaagcttgctcttgggaaacaagataagatttctacctcatgcctaaccaattacaataggccttaaaagctaagctcctcaattgagattttatttcttttcccaattacattctccccatgggattttcttagaggtaagcagagaccaacagaaccaacagcttgatatccaggcataaaagccccaggaattatgattttgtgttggcagatggtcaaactaagctaatgggtggcagaagcaaataacaccccagttaattttctagctcaatcaattctgatctcatctcaggcttatagcacattgcactgtcagcccaaatttaaaaagacagtacattccctcaccctacagaatgcagcaatagatactacaaccagaggactcaagttctaagcagacagctttgaaagtggaagagaccctgtaattccatgttgtttattagactgactcacataagcctcactcctgacagggattctgtcatgctgggtgcaggagtggaacacacctagcaaggctaactactctttttccagcccctcctggattgtaactattaagacgggcaggcatgatcccaagtaaagatctcaaaattcaaactgttgaaactcagaagtacatcttcctcttgatgaatataaaacccatcctagaggagaaactaagattttttttttctacctaactgaaaatatggcaagggattcttttttgtttggtttcttagaacatttccaaaactctgtgacaccattatcatgatgaaaaattccacttaggaagtcacaaaaaatactgtggtctgatgctggggactattgaaatatttaaaaacacaattatttacaactaaaatgtaattaagtccaacaaattcttttttaatatttactatatatttcccactgtactacacactaggaaagcgaaggtgagtcaagcccagggcctgatgtaaaataaggacattcacctttctggttctctttggattacatgtatattataatgcataatacaatatcagtatttgctcatgagttctccattctttcaacgtcttcttttcacatctcattatggtaagaatctgtaattctaatgagatcaaatatgccagtttatcacagtaactaatatacattccaaaattgccaacaatctccacatttgcctaccgttcggctctttatttttaagcagtaacatggtagaagagacacattacttctttatgttcttgtaagaagataattattcccatctaccccaaaatattggtattatgaatgacttagggggtacatatgggagacaaatttaaaacaaaaaataatctgattcttttattggccaaaggaaatctgtttgcttctgttaaaatcttataatatttttaacagagttcagttacttcttattttcttcctccacatatccacattggtaattgttacacttaatttttattgaactatttaaacttcattttaatgttttactgtctctttcttcctgttaaaactttactaactcatctaaaggatggtgtcctagttcaatgttaatgatgtgcttgatgtaatctcccactcaatacacacacatccccaacacacacatagacacacacatatacacacacacacatatatatacacacatacacacatacatatctacacacagtttgcagtttattttttctattgattattcttaaaaagttaaacaaagatagagaacatcacaaactacttttccgttctagtctcagtgcttcacaggctagttaattctaaggtagaaaagatggtaaggagattagttgcagggactagaaaattctactttagcagctgagactttttctctgcctgctcaaacactgaactttttccactcccagatcaagtccaatcacatcttttctgaatcactgcattaaagtgattccttctttctttgagttctttatgctttagtcatttacaattgaacactaagttatatactttaattgttcttttgttgttttccaaattcatattttgcctcctgctaaatctgaaggtttcttgaaaacaagcaatataatcacttgactatactacattaatagtatttgaatggtaatatgcatgtgaagagttagttaatacatactggtgaactgcttcacaataatattctactcataaaaccatgagtgtaacttgttgcagggttagcaaggagccagaggagcttagcaaagccatgctctgtgggaagagtacaaaaacacaaaaacgttagagaattcttttccttggcatcaactcttctgagatggagccatataggcattccataaatgttaactgattgtgatcaacatattttacttccaagatttcacatccaaccacctgccactcatccacctctaatgttagattccaaagggactgcaagttctgttttccaggtttgcctgcttgctcctctggattctgctttttaaggtaggaggcaagtggctgtgagaaggaacacatactgcttttaaagaaatctgggcaaaacagttcaataagtgcctgaaaacgaggagaattataaagttactgaaaataagaatttaaaagaggaaaaactaatgcattctaaattctacattaccagagcccacttttacttgcttcacagttttcttcagttccaggaacctgcaggaaccctcctgaggctgagtgccattttaaattttccctgtgagtagaaggccctgtgaagtagctttagaagttttggaaggtttactggctttggtattttgtcaggcagttcttttgatcaattgctgagcctgacaccagaaggccctcctcctccacctacaccctacagctctacaacatctgaagtcgcctccagtttctattttgtttttgttttttcctcaaaagaaaccagaaacccatgtgggcatcctgtactggctttttataaactctgtaattctagaaccctggacatcagaaagactaccacctctttaaaagtgactgagctataaggattcaattaaggatgatgaagaagaaattgctcattcctttgtatgtttcccttatgccaaccacagaatacaataaatagcatggctgacgagattgttccacagaacctttcatcagatgtatttggggaaaaagcttataatttaaaaataaaactcttcagaatcacctctgcctggtagagtttttccttccccagggattctctacaaggtaggtttttgcttccccaaagattctcatgtacaaacaagcactttaacagtactattaatacaacattttaacaaaaggtgggagtagtaaagatttgttttttgttttttagagcaccatgatgggtaatttttgttttatgtgccaacttggctatgatgaccagttgtttggtcaaacactggtctagatgttgtaaaggtaccctgtagatgtaactggcatctaaatcagttgactttaagtagagcagatgaccctacatagtgtggctgtacgttatccaatcagttgaaaaccttgagaccgaagacaggtttctcagaaaggagggattctgcttctagactgcaatatagaaattctgcccgagtttccagctttctaagtaaagactgcaactaacccttacctgaatctccagcctgccatttgcccaacacatttctgacttgccaggccctacatgagccactttcttaaaaatcaagcaatctataaatactcatatagattgcttatttgcagttatttctaattattttttctctcttaaattagtgtatattgctagacattagtcaagagagtatcatttcaggagttatgaataaataaaattttctcccaaataaatgttttaatttttcttccatcatgctttaaatgtatgtgttaaaaagtcaaatcccttcatttaataatctgtgagcagatatgatgatgtaataggtagcacattaagatctaaaggaaaagaataggggaggataggagttggggtggtgggggcagcaggtggtacctatttgccaagttcctctttctcagtttcgcctgtggtctagtctgtgaacagatgaataaataattagaattctctctttccacctctgtttttcttgctattctgaagtgcctgaatatgcctataggtaactgtggatccaagtaccggctataggaaaagaatcttgtcatgttgtgttatggtcgtaatgctacagaaagtagcattaaaaggaggtgctgaggcatgcccatggttgagacgtatttgcggcaggctccgagtcctgccacccagtactccacacaaactgagctatggaagaaataagtatacatttttcagcactgaattaaagatgcctcttttcccagtactctatactagcagtagaaatgaattccagggatgtgcaggacaatgacacagacaaatggttctctgctgcatttctgcagtcagatatgggaactgcagaaacatttgctttgaagatacataatatccaataagcaaagaagctgggttttttccctgtgaagttatccccaagagaaaaaaagatcagaattagaatgctttgtaaaagtatttaaaactttatatgttggcacccaagaaatgtagctccactcacccagtatcaggttatctcttttgatttcttttctaaccaactgaaataaggagtatatgtattctgaaaggccaagacaatgttacatttcttgcttgtcaagttaattaaacctcagaaaataaaggtattttgtagaatagtcatatgtgatcacatattacatgtcaatcttcacaatttataagcattagcatataagctctattaaccactgtgtctcccacagatagaacaatgcctatgatactcactcatctttgttttaggagtaatcagtcatttttaaaagacatgacatcatttaattgtcattatggtttctgaggttcttcatattctaaatgaatgtttactccaaatggccaacaatttgcacgaggttaacagaagaatcaggcattttgtgttttgtcttgctttcagaataacagaatttccttcctagacataaataaatggagtttgactgtgaacaccaattatggaacccaggtctatagaaatacactgaaaataatgctgcaaatcactaaagcaagaggataattcacaacaaacatcagtatggggctgtaccaaatggaaccatccaaaggttccctgcctcaggtaacaagctttaagcaatgcttgtaataagccctggggaacaattatgactagagaagacatgagtagagtcaaggtgtctcaacggtgtcaggacacagagaagtcaagagatatagaccagatttggcagctaattttagattattaagtagcatcacattatcaaccatatgaatttattaaagcaactttaaaactttattcagatgaacttacccagacttctctgagacaaagcaaacagaaaatattttcctaaaagatgtgcaatgtaagagtcctcctctctgcttaaaagcataatacgttaaaatatcagactgatatgtgatctcatcttaaatatttcctgtaagcttcatcttcctgttttctttagcaatctattccccttctgtccttagaaagcaaagggtatttgatgctaatgtactttgttgcaatatatacacatttctcccttgttccagctttcctaaagacatgaaaaatagcattgaatcctgtttctggcatggtcaatgttattcggctataaattttctgtgatttagtacatgattttggttgacaatttctacttttactatgcagtataactaattaaacattaagaagctttgttgtcatgctgttgataaaaatggcacttgcaaaaattactaatgactaattctataagaaaggacacacagggttttctttcctacccacaaggacttctgaattatggaaagtgaggtctagacaagatcaaacaaggctggaagagtggaatcaggggctggaccctgatttgagtgaggaggtttaaatctatgtgcttatcaatagatttaaatgttaaccaaataataatgtctctgaaattgtatataattaagaatacatgaaatttacattagagggtaatgccttttaatataaaattattattcaaatgctgtagtaaattcctgaatttactactcctgtcccaggagttaatggagtttgccagctgagaacatactgtttttttaaaaaaatataatacaaacttttttttctataaacgcaaaaatagcaattgaagggggagggagcgaaaattctgtcctatgttcagtgtctggaagcaaaacatatgctcaaatttttgttctttgcaaataactacttttcaataaaacaaccactaaaaggatatattgtcaaaacaaaacactgttttcatgaaaaatgacttaaaaagttaaagtagaatttatgaatttctaaagactgaattaggttacattgcctaacatttcaaaatcaacctcctaacatttaagtagattttcagttacacatatactttaaataaaatgtggtggtattttatcactaacatcacacatggacaaaccacatttaaaaccatcgttacatttgtttttccaacatttcctctggtttaattcaaaaagtatataataacttcatttatgaaattcctactatttttcaggtattttccatgcattatctctcgtttaaaatattgctttcagtattttatttaaagaaaataagtttcaaagaatttgtgtaacagcccaggtgacatagctggtgtacggctgagctagagtttaaaccatgtttatcaggcttcagtgcagttttctccccatgttacccagacagaaccagcaaaccataaaaagttttataagcacctgatctcagataaaaattgagcgccaagttaaagacgaacccacaggtgcccacagtatttttattgtcaccatcagtagtgttctcaattcctgagaaataataattttggggatctggaaacaagaaattgaaattcatagcatttcttagaaattccttcaaccataaattattatgtacctttaataatattttgttttaagataacaatgagtgaccataatcataaattgtgtatcatttttctgtaacagacttatacatacaaaagtgtcagaggcttttctataaaaaagatatacagtttttattattaaaacatattgtgaaaagaaaacatatatatttttataacatcaaaatatgcttacctgacatacatatttggtaacagacaactgtcatagtagcgaatgttaacacaaaataaatgtccataaaattattttttaaattgtaatataacaccacagctatttaatatttaaatgctattattcttaaaatgaaattttgaagcagataaactaactgctctctctgaaagtcttgacctttgttttgtgacgaatattctatttgcaattttcttttcatttttgcattgacattagttgaataattaagagtaaatccgaaatggtcttcatgttaggcattaaggtgtatatactgatccatataagctaattttctctttgaacataatagtttctaggtttatccagagtttggttttgctactgaaattgacattgcttttgttaattgaagtttttaatcattttcagatttcatttcaaagtagttcacaacattcaacatttacatctttttttttttttgcattttaagtatttgtacacaactgtaccctacagcaaatattcaaacactggaaaatatctgtgaatgttattggataacattaaaataatgtaaaatttgaattgctcagcaacactaatactacacagaatcaagtgtagaaattgttaattcaaggatacattttgcctccaaaacttgtttcttgggacactataggacttacataaagtatattatgtgtaaaaacatataaacatattttgtatttacaagtatgattactcactgttagtagcagaataaataaattgtgatttaggtaaacaatagaatactataccacaatggcaatgacaatgacaatttagaaacataatattcaagtctcctgacacagaagcctacaaactgtgatgattccatttttacaaaatacagaatcaggcaaactaatctacttagttaaagtcagaatgttgattactttcaggggtgcagtgtgtaacagccaggaagggagcaccaggatggcatgcttctgggagctagaaatattctgctttttgctaaacacatgtgtgcactgagtttgtgaaaattcatttatctgtattcttagtatgcttcgataaaaagttaagaaggtaaatataaagcacaaaaaaatgttacttcaaaacttttgacgaaagcagcttaccttttgaactagtttctgcagcagacaagaaattagaagtcaaaaagattttttaaaaatttacaggaaaaacactaagaaaaatcactgagactcctatcttatcattagatataaatggacatattgtttggtaaatgttattttctcaacaatgtatcaatcaaagctgtattaattgtattctacttatcttgtcaatttagttttttagcaattcaaattttcttatgcctacacatattaacagtacctaaatgaatacttaaaatgaacttgagaaatgagctttcaaataatgcatttctgtgattcaaaatgtttgtttgtgagcaaagcaactccaacttctactaaaaaataaattatttagttttgaagatctatatgaagagtggaaattagactaaatatcttactagagatcatgtattcatgttttgcggccccagtatccagcattgtagcttcgtaggagataaatatgaaccatgttttccgagagcacattatctttccatgaaagtgtagtaatatctacacttgaaactctatggaaacttgaaactctatgatagtttgaaactcactgctcacaggtacatacaactctgctttaaactaagttgcagtaacatagaaacccataggttttaacagtattgtttaatggagtttaccagctgagaacatactgttttttaaaaaaaaaataaaatacaaacttttttttctataaacgcaaaagtagcaattgaagggggagggagcgaaaattctgtcctatgttcagtgtctggaagcaaaacatatgctcaaatttttgttctttgcaaataacttgtggaagaaaaagaaagattgtgaaaataatgcagaatatcttacaaatgaagttattttcaaataagagacttaagaatataaaatgagactttcgtttcagtatctaatattactaagcaaagtgaaattgccataaagccacattctgtaactatagcaaccttgcaaggtaacacaaaagggctcatctttatgcaacagttttagaatatctatgatcctgaatgtgacagtatgtactatcttttttggtctgctgtgacatcctaatacatagatattatgaactatatccaatggttcattctttatcagtcaagaaagctatatcttagaaacatgtttaaaattaaaatgaaatacgtttaaatttaaaataaaacaggtttaaacagttaaacttgctaaccataaactaccaaaaaaaaaaacccacaagtgatatcactgttgctattttaaacataaataaaaatatcatacttatttgtatgtttatttccaactactattttatacctgaataagaaaatctcatcaaagtgctatgatatccccataatgacaacttccaaaatgaaattttcttggtctcaaagcacacaaaactctgacacaactgaatgaaaatgtaaaaatgaagttgtcccaggagatatgaagtcatacatatttactgaagccagcagagagcatcattaaaaattcccatggtagactcaatgtgaaagataatttattccacttaaatatgcctgatgatgatattagaaaataatctaaattaagaactcttggataagttgataggtgtctttttgctcagaatgtctaaatcgtaaatatttctataaacacacacacacacacacacacacacacacacgtctataccatttaatgtagtccaaagagatttgagttagaagtacattttagttaattgtctctcctcaaataactctctgtgggggagaataaaatacaaaataaaatatctaagggaattcaccccacagactaagtataaagaactctgtaatttggtttgaatgagcttttggttttttggtttaactaatacagagatttttatttgatcattgtatagactagtgaatccatttttgtgctcctttttaagtagtctactggggagtataacaaacatacactgatgacttaatgtgaaaccaaacacaaaggtgtttacccaaacacttttctaactggctagataacatgtactaaaaataaaggcccatagaaatgaggagaatgaaaggaaaagaggtggtagaaaaataaagatagaaatttacttaatatttttcaacatatattgtcaaatttttatctagattgttctttctggaatgcaataaaatgatggtttgaacaaagcagtggaaaaacacgtgatcccaattttggcttgtttgttttatataatattgtggtttctattcaaattaatatttctaattttaaaaaaggaaatttgcattaggacacacaaaattactatgcaaggaataaattagacaatctcataagatttgagatgtagaagattacaaacaaaaaataattataagcatgactttgaaggccaaagggaagttatttgctgcttacaaacaaattctattattaaagtctgtattctatcaatagtcatttgtgtgactgggtgggagtgtttgtgtgaaacagacaatatgtccatctgagaaacagtaagctgactgaacagtcatgagattatttgctcatatactgcctggcaaattttaactgtcctttaaggatacagtttttaattttgttctttttgtgtctaataatagctatattatactttggagagcccaaagtctagaatattcaaagaaataaattagggttattatctcaatcattaattcataaacgtgtttctcatataagcacatcactggccttattcttctttaagaaaaagaactagtcagttaaatttcaaataatttttagaatatattaaatttggatgagaactacaatagaaaataggggtatttaatgtatagttgttagtcttattcatcacttttaagaatatatttttcttgaaaaagcaataaaattatctcagaatgcaagttactagttttattttattcactttatgttttcagtatccaaaatggatttgaccaactacaattacgttagactgttctccatttctaaataaagttctgatgttgaaaaagaaaattttgcatctctcttctacttgatccattagaggagttcggtctacttttctttcttggattgccaaactctacataaaaactaagcagctaaatatttgcaaaaggaatatcagtttcagatacgtactaggctatttaatactgtttcattgagaaagctggccatatttgtaaacagttagaatagcaaagatcttcagaagtattttcctgctctaaaaagatgaaaaactcctggtacatttctcagagtgggaaagaagttggaaacgcaagaagctttgagaaaatggctccaatcattttaatggctcactaaagtctttagtgtttaacatctgtgagtttatctagtctttcgtttactcttttaatgtctatgagtcaaaatgatgaggctgaattgtgttaagtgatatcacatccttgagcttgccatttggaatacatttttcataatagctaataactatcatttatttaatttttctatcgtgtttcattcattaaattcatgttcatggtcagggaaaagatgaaacttagtcaccaatatgagggtgttcagcaacagattcaaggtgctctttagtaatcatgctttttactttaacctcaaattgttttactgaattccaaagttgttgacaccaagactcataccaaattgtaaaatagttatttttttatctttcctttctggaaaataaaacaataaggtaccttttaagtaaaaaaaaaaaaaaagtagaagaggctggataatgtataatcagtggtattttcatttacatggtctgttttctattggtcaccatttctacactgagaaacaatgatatctgtcttaatctttcaagatcagtacagtgtcacagctgactggaagaaatgacagacaattcttaaaaactgggagaatgaagtatagagcttcaagaaaaatgatatcaatactaaccccaaacattaaaacaacaaaccaaccaaaaacacaacgcaaaaacctttggaaattataaaagagaaagaagggattggtcaagatcaaacaattatacaaattggagggaaagaaagtccatgagatttaattggaggcaggtgaaattcagaatttcttccaactgatttcatgtttgcaagggtcttatgccacagccagtactaaagagaaagaacagctcagggctaaggtggaactgaaagcagtgaaagtaggagggaggaccataaaattagccaagtaacctggagagttaaaacagtctagagattttttcttccttctttcctttcttgctccctctgttatcttttcctccctctctctctcactctctgccttactgtcttcattcctctctgcagaaaatcatgaactgcaataactgtaatccaccattagcttcagaaaaaagtataatgttgcttgaattttatgccaaaatatgttttgacaatgataatttctaattgccctgacaatgtattctcaataatcatacaaaatcagaacaataatgcaggtactcaatttgaattctgtggcttaactcttgtttgattttcatatgataattagcacaaatcattacctacattctatctctgattaagaaatggcttcctttaacctgatggatttgataactacctgttcaaagattttgctttcctctttattattttcttatgattgtcacagcatgaaaaatatccttgttgtttggaaatatcagattataatatgtttaattggtattctactttacagatcaaactatcatagcctaaaaagtaaaatctaaccttaacacagacagcatattttcatcatgtttaatcacaacttgatcatttctcagtctttcagcaaaaaagattcggttttgaaacatggagattggcaaagaattttagctttgtaaactatgagtcttcttaactgctcttcatgtatttaaaatcccaccaatacttgaaattggcttatatcaaatgtgccctctttctttctgactttccatcagacgggaagtgttctctgagctcttcaaaatactttgctcctgagttatttgtgtactcttgcatattaatatgttgagttgcttaaagatagtaaccatgttttggtttctttgatgtctcccactctacttgtcaatgatttgtacacagagcaaatgctcaataaacactccgtaagttcatgcaagtaaaagtaatttgtttcccatctaaacaaaggaaaaaccatgtctgatggcagctttctttccgattctatctgtttaacctcaaattcaaaataagaagaggttgtggtataacgtgtacattattttcagaaaaaacatatttttacattcaaatataacttgtaattaagtccaaggttatttatgtagtagagctaaaatccttcttattggtaatagcttttcatttaaatatagaataagactttggttacatgattaatttatgttggaatatcacacttttagtaaactttagaaaatgtaaatactaataaaatgttataaaacaaattttataaagcattcataaacataactgcatacaatatataaccacttttattaaaatatagcatttagactatcataccaggttattccttctaaaacatttaagtatttcctttcagttacttttcagtaactaataaaaatgcttatttttcctaaacatatctttaaaataaatctaatttatcagtatttaaaatatttttaataatgctgcatgttaataacttcctactttctatgtgctcattctgtaacatgagcttcaggttttcctttaatatagaggcttagttttaactcaaacacacaaatatgcactgggcagagttctcaacttgtataatgcttctttgtatttaatatcatgcatcacctacttccaaaattccttttgctatctgttatgtttagcaaaacaaatgtgtcatccagcagtgtcattaattagaattccttgtaaaaggtggtgaagtgagtgaaactctaaccttaaaatatattttggatcactctgcttcacaaaacttagagaagacattaacactgccctttaaaaatcaaccactcagtaaatgtaccatatacattttatctatatcacataatgaaagagtaaaacataattaaaagactgaaactgacttattttatttaatggaggacatttaaggagtgaaaatttatttcaaagttttacttagattttttttaatgtgaatcgttagttttgtcagaccataattgtccttagctactctttaatggtatttaacactcacccatatttcaaagttcagatcaaatatatctgatatttgtcagactacgttaagtatgaatgtgattattgcaggagaactttttattcttcttaaaatagtatcttcagggaaaattttatttccatttatattgaacaattaaaacaaaaaacatgaacagaaacctacactgaaaaattcatttaattatcaccttaccagctcataattacttcattctgaactgagataacgactgtagtgaaacaactgtatttgttttattgtattatgcacaaaacacaaacttctaatgattaggtttattttcagtaatatcattattcttaaattttacttcaacgtaaagaataaaataagtagatatttaatgccttaaccaaataatgcaaaacttaacatattttaatccctatttagtgaaaacaaagcacatgtttatacatggtcaatattttactacttaggggcttagatttttacttctggccaaaggatactccacagcctcctcgaagtcaaaatttcagccaggcaaacagtctgtcagtaactattgattgtttagagaaaatactagtgatttattgaaagatctatgcttctgtctttcaatagtaaatgaagaagtaggccaagtgaaccatgatatgatgacatggagaaaagaatatctccaaaattgctgctgcagatgcagaagaaatagaaaagtggcaagttgaaatcaatactcattttagacttagtgatggaatgcttcatagttaccagactgaccataaagcacaggactccaggtcagctgcaaaggccataaccttctttcctttttcactttatagtagacataaatggaattgttctgtttatacttaaatatacacgagtattttattatacaatctgatataagaccatgtgaaagtctcattgaccttgctgaggattatgctgtttgaaagattctcaactgctcaagaggtagacttctataaaaattaatcattacttgaaaaatgactgattaaaacagattactgctttaataaaatcacatgccaaggctagagaaacatcctttcttgttaacatatcttgatatacaaagtatactaccagaaaaaacttacttttcctcagatgatgatacagtttctcttggaatgggaatgtaccataagcctggatcagggtaaactcttgtttttatacagacacaattatatttttgaaacatgagtagcgggcaaagacttctcaacatattcacttgtttcttcattcatcacccatccattcattaattcactgaattgatattttctgagtgcctactacatatgccatgcactgttgtaggttctgggggtacagccacatagaaaacagacaaaaatccctgtacttaaggtatccaatattatcaggatacacaaacttacagctgtataatatattgccacatatgaacaactattattttagggaaagaaaggaaagaggatagttctgaagcctttatttcagatcagatggagacagacttctttgagaaggtgacatttgaacagggattacaataaagcagggaaacttgtattgccaatacctgagggaagaatatgcaggaaaaaacaataggtgaaaatgtcctgacagagaacatggcatttattaagtctgcttcattaaatgaagttttgagaatggaaataaaatactgagaataattgtagatggaagttgtgatgcttcctttatcaaacagttattactcagctattgggaattgagagatcaatatctcctaaggctgggttatgattaggttctttatattatgtagcacaattcattaagccctcccagtataatatgtttttccattcaaaaaataatatacactggtgtagtatttaattggtcatcttacagaggcagtaatactcagacttagagaaagagccaccaaatagtctgaaattcacatacagctctagcttgatagttgcaattgtccaatcctttgaaactaccttgacatggaattcttaaaccattgataaaaacctgcaaacatttaaagttctattgagtctgagataccttggccaataatataaacattctttactttaaacatacatggcatattgtgtacatacatatatttattcataacatatgtatgtaaacacatattatatattggagcagccattaacatgtgccagttgccatatgtcactcaatgtttatttcaacaacttactgttcatctttaaggagtgcagttaattgacaactcccaacaaataatacttgcaagatctgctgaggccatgctctctgggtttgcccctagccaatgactaaccatggcgtggtcaagggagggcaggaagattgggacctggccattttcacccaaacaagaactcctctgatgggcagtcttcactccagagctttccagagaggtggctgagagcctatcagatctgtactgtggcttgaggcctgtcacccctttctatctggattctttcctcttttatcactcataattgctacctcccaacaactttttgtaccctaagtgcatctgagcatttgtcccctggagcacccagctgtcacatgtgtttatagatgtacatgcaaatatctattattttagggtaggtaatacattattaaaactcttttcacttacttatagtatatgactaatgccacaaaaggacagacaattattttgtagttaaatatatcctacttaaatgttaaagggggctttcatataatgaaacatttgacatttgtgaataatttttaatgagaacgtcaatatataaggcagcctcaataaagcattttcctgtagggtttaatataggatttggtttggttgtcatatctaaattgtttattaaaggaccaaaagattcttcttagaagctattctgatatttgagatgtccccatgtcatataactcaagtgtcggtgcaggacaaatctttactatgtgatatttatttttattgaatccagaagttctctgattatgcagggatgtattataattatagtaatgtacagtcagcatatacattcacaattataatgtgatttttgataaacaaaagtattttcgtttattagtaagactttctatttctggtactatagttatccttcaggattttttcaacaatttattaaaaacttgactcattgttcaatttccacctatgagtgagaatatgcggtgtttggttttttgttcttgtgatagtttactgagaatgatgatttccaatttcatccatgtccctacaaaggacatgaactcaacatttttcatggctgcatagtattccatggtgtatatgtgccacattttcttaatccagtctatcactgttggacatttgggttggttccaagtctttgctattgtgaataatgccacacaggaaggggaacatcacactctggggactgttgtgggttggggggagggggaagggatagcattgggagatatacctaatgctagatgacgagttagtgggtgcagcgcaccagcatggcacatgtatacatatgtaactaacctgcacattgtgcacatgtaccctaaaacttaaagtataataataataaataaataaataaataaataaataaataaaataacaggaaaagcaaaataaatgtgacatgtctaaaacagtaaaataaaaccaaaaaaaaaaacctgactcattctcagaataaaattaatacaactgaggaaactgtcaattaattgttcttcactttcagcaaaaatgattaaagtcaactgcacgaacaattcaagatttgtcctgattattcatttgaaacttcctattttccccatgtttttccataaacgcagaacacttaattaatatattctatacacaaagaaatagttgaaattatatgggcagcactttattgtataaattttctttatagtgtctaagatctactgaacatgaaaaacatttaacacctcagtccatgagattaacataaaaattagtgctaatataatggtgagccatgtggttatataatttatatgtaaattatctcaaactaaaaaataaaatcaacaaaaagtatatgttatattactgaatccagtggcagaggatatcatttgaggaatgctgtttctacatttttaaattaattagaagaaaatttagcaatgggagttttgtttaaaaatataaattataccacgatgtaatctaacatttgtttgactaggcaacaaaaatttcctggccttctcccaagattatgttattcctagaaatataaaataatattactccttcatgttattccatatctcatgcttacatcaaatgcaattactactgcttttcaagaaacaaccatgacaagccaataaataaagtattttgactttgagttgggttcccactacaaatgaattgccacaagaataaatgacaaattattcatttgctattccctcccccaagtttaacagaagccttagaaccttcagtacatctcaaacgctgtaagagtaatttatgatcctgaaagagaacataccctattggggcctaaatgaccacaaacaatgagccattttatgagtgttaagtaaggaatccaataaaaaggtgatttaaaaagcagacatgacatctttgaattaatctttgctctaactgacaagtaaatgcctctacatattggatatttttccccttacagcaaaaaaggcagtaactagtcatttcattatagataagttgctttaccacttgagcctgttttctcttccgtaacataaagaggctgtatcagaggtggtctagttaactatattcaggggtcaggcactgaaatgagtgggtcactataaattaagacaaaatactgctttgagctattttgttttttttggttgttttttttgtttgtttgtcttttttttttgagatggaactttgcttttgttgtccaggctggagtgaaatggcacaatcttggctgactgcaacctttgcctcccaggtccaagtaatggtcctgcctcagcctcccaagtagctgggattacaggagtgcgccaccacgcctggctaattttgtatttttagtaaagatggggtttcaccatgtcagccaggcttgtcccaaactcctgatctcaagtaatccaccctcatcagcctcccaaagtgctgggattacaggcatgagacaccgtgcctggcctatgcaagaaattttatgtaagggcattgacattccaaacgattattaaaacccatgtgaaatatattcgctccacaaccctccaaagctcccaaatttcaaattttggaccaaattatctcgaaattctctcaagcctcttcaatctctaagaagcaatctaaaaaagccctgataatgtgaaccattaaaatcaatataacacaggcacaagatagtagaggggattaatgcagaaaattatttcttactatttactgagtcctgttagagaattgcatatcaatgtttctattctttcatctggtctctaaatcacccaagtatcactcaacgctacatcttccaagaaaaaaaaataactcagatattatgggaagagagccaaaaacatcccagctcatagcctaatacacacatttattgggaacctactatgtgtaagatactgtcccaggcatttgggataaatcagataacagcactgacaaagattcctgcccttgtggggcttatactctgcagagacaaacaaggaaacaatcattaaactttaagtaattcgtgtatatattagaaaatggtgtgtgctatggttttctaaaaaataaacaagtaaaagggattgggagggtgggagacaagtggcagaaggttgaagtatctaatagaaaggttcagaattggccaggcgcagtggctcacacctgtaatcccagcactttgggaggctgaggcaggtggatcacttaaaatcaggagttcaagatcagactggccaacatggcgaaacgctgtctctactaaaaatacaaaattagctgggtgtggtggggcatgcccatagtcccagctactcaggaggctgggggcaggagaatcgcttgagcccgggaggtggaggttgcagtgagccaggattgtgccactgcaccccagcctgggcgacagagcaagattctgtctcaaaaaaaaaaaaaaattcagaatagactcagtgaggtccaatttgagcaatgatttgaaagatgtaagggatttaagcatctgaaagaggcactacagccagcgccctgagatggcaggaagtgtcctgagcaaaactgcaagaggtcagtgtgagagaaggagacaataaaaggtctgaaaattctcctagaaaccattaacactgtgcattttagctactatatggattttcattctaagtaactgttgaaatgaggtatcatggctaacagcaactgctttggtgttaagcagctctactgtttatcagcttcagtgtcaagttgcttaatctctgtgcttcacctaacaaataagtataattgcagtataagtaccacgtaggactggttatgaggataaatgagattaatgccaaacgtcgtactgtgactggcatagagaaaccgctcaataaattgttttctctgaacttgctactttcaacacaaaatttttctcaaacaatgagtatcagtgataccaggaccattctaaaacttatctccaacatctatgctcagaatgatgaatcaattaaccaacaaacctctactatgtgcaagggattattttaggtgctgaagggatacaaagaatttaaaatgcattccttgatattaataagaacatgatttaagtgaagaaataaaacatacacataaaaacataatttaatattcctatcaataaaaaggaataaagtactgcatctgcacaaacacatttggatgactcttaaactcactgtgcagaaatgaagaagccacacacaagagcacatacttggtgattccaattaaacaaaatgaagactattctatggtgacaaaaggaagatcagtggttgcccagatccaagggaaggtgtgagaatggtttataaaggagtataaagaatcttcacaatctttggaaatgttctgtatcttggttgcagcattgtttcacaagtgtaaacaattgtcaaaattcatcaaagtgtgcactttaaatgggttctatttactgtattcctccataaaattgatgatagcaaaaacaaaacataatagtcataattgatcagaatggattgaataatcactacagtatatcttccactatagtttgaactagaaaattacaggacaagtttagtttagatatgccaggtcacacaataatttccagatatttcttgaattgcattaggtctagaaattttgttaagcttgaagataaagttctcctattaagttgtcattagttgtggctctattcagtcaatgtctgaataactttatgtcactgtttctttgtttctatatgaagaatcctttcatcttcaaactttttcctcaaaaattttctttttttatacagttcattccctcttaggactgtcccttgcagagatttccaacactttcttactgctttcaatgtaactatcaaagattttaactgcagttttattttttaaatatgggccattctggcttctatctgtagcccttttccaaagatgtataagagaggaagtggcatgtctaacatgtctaatcttaaaaaggacacacttttcaaagagttttattttcaaagttatcctactattggttaccaataattataacacatttttatgaaatgtcaaataaaagacatgcatatatccgtagggaggtagaaaatgaaacgggatattgtgctcttcctaggattcaactttgctgtaatattctatgaggttatcattcaattgttctacaatctaaattcccacatttcaaaaatttaattttcctatgaaattaattgcttaatataaaaagcacatttataatttattcttcagaaatgaatgctttgaaaatacatttaaataagtgttgatggacatcattaacagtgaaatataattaaaagagtaaattatttagttgggtttttttaaccagaataaaagatttctatggaagctttctgttcagaatattaaatgcctaagaagtcatactagattttgaatgtagtacctattctggaaagcaaattcaggattcttgccgacagattaaaaattatttcctaatatagatgactcaaagaaatacctgtcaaacagagagttaagacttctgaatgcagacacagcttgaaaaagaagatgatgtattttccatggagcatttgccgaagaactattcagcagagacataaataattaaaattaaactacagtcgctaaaataaatgaacgatattctgaagcaataggttgacttttaatcctgattttcacttacttccaagctcacaaaatttaaccatctgcagcaaatcgccacatcaataatttgaattagccggattccaccgtaatttctgaagtgcacctcactccaatttccaatgcagtacaattgaaaacgttatcagataaaactggttgcagaaggcttggaacattaaatgctttgacaatgacaaatagaataaggtgagatgtgtcttaaaaggagggtcttcccactacactgtgtttattcaattttagggacaccctctgccacattagaggccttttcattttcttctctccagacaaggattagtagatgtgggccctgcttcccccaggtttatattactgtataagggtaaccctgtgaagtaacaagattaccagagagaaaattttttaaaaaatttaaaaaagggggtagattatgtcaaagccttccttgaagagagagttaatttgtttttttctaatattttgcaggatgtattaaagaaagtctgtagaaagacaagcagggaaatgtgacaacagactatacaaagaatttataggttcttatgacattatttttctttgatgtaaccccatgttggtgatgttatagaacttttgatatctggcagaattatgtcaaatacatgaactgcagtttaagaagcataaacgtcaggttgttgaaatcttccacatcaaactaattagaaagaatttttgaatgtgaattacagcagtttattagacgtcatgggagatacagaagatgtactgatattaggcacacagaggtattttaaaatatgtaataactgaagagacaagacatgaaatataccaaaagggatttttttgtgtgtaaattaagcatctaaccataaaataatcagagaattaatcaatctagagtaacatgaatattatcaagagaaggctgagcaatacaaataaaagaaataatatctccccatggctactcacaagaaattaaaccttgctgaatgtcagtttcccctttgtgacagggatcagcctaaaggcctagtgtccacaacatgttggacaatgtgggatttttaagtgcataatagatcccaatcctttaaatctccaaacctcaccatatcctatatcacattacacttcaactctccagtggaagggtaagtatctgggagttcaccctttaaggacagtagttctagaacccgtagtatgtacttgggatcagcctctagttgaggttattaggtctaagtcagttttactttctattataagcatatttgtcagtatcaattaaacaaaccctctcacttgggtaaaatatttagaaaacggaaggcatttcaggtgggaaggcgggtacaagtaagaaaatagaattggaaacaagtatggcttactcaagatagcatgaacagacctacttgtcagagtgaggattaaaagtaaaattattaaataaatagggctcttcaatagtaggaaaataatgtggaggagcctgtaattgatatgacaggtaataagggaacatttgcacatttctgagcaacggcattccgtgatgttgtacaagccagagagagtgaaacctaactaagagaaaccagctaaagcagctggcaggaatgatgtaatgcaagaacgaggtgatgagcgctacctggattagactgagctcactggaggtagaaaggaagagatggttctcctaagaatcaagaaaactgaactcatattgaattacctcttcaattctctcaaatgtcatgctgccagtgaaggccttacctgacaacctcatgtaaaaattaaacctccttttctcatcggtacactcctgtgtcccattcactgatttttttctctatagaaggtatcactatctgacacactatttatctggcttttgttgtttttgttaatgcttgtttcataccattaaaatgtgagtaccatgatccatgattttcatctgttcatttccctgttcccctgagcccacaagaggggattcaataaatttgaactgagtgaacagaatgaattaatatccaataaagaaaacaaagatgaggctgggcacggtggctcacacctgtaatcccagcactttgggaggctgaggcgggcggatcacaaggtcaggagatcgagaccatcctggctaacatggtgaaaaccagtctctactaaaaatacaaaaaaaattagccaggcatggtgggaggcacctgtagtcccagctactcaggaggctgaggcaggagaatgacgtcaacctaggaggtagaacttgcagtgagccgagattgcgccactgcactccagcctgggtgacagagcgagactccgtccccgcaaaaaaagaaagaaaataaagatgagaaaacattaattatgctttcaaagttccccacctggcgttctggtacaaagttatatacaagcaagaacttcattaaaggatctcaaataaatcttacaatcttaaaaggaaagttcaacaatagttcgatatcacgtgacactaagaaaaaaatgtgatttgaccagtaggtaatcaaaaacagactaaacaacaatccaaagaaactgccaatagtccacaagttcttcagtaaatgtgaattatagcaataatgtgctaatttgtattcactaaataggttttcaagctttcaaaatgtttaaaaatgttttcatttatcattgcaacacgcatggcgaatggaagatggagacactaaggagttaaataacctcccatatgctgtccttccatattaatgaatagaacattacttgcttctataccaaactagaatttggtgggaaagtcatgaagttctccaaagcaaagttagagccattagattaagaaagtgagtgtaataatgtactatttttttcctttagaaaagcgtaacctcaattggccattgagaaggatggctttattagatgatgaggagtctgaaatatcattaattcactcatcagcatctagaaatattctttaaccagggcaagacaaagaaaatgcatttattctcagcaatattcattataccaaaacatttattcattttgcttagaatcactgaagtaaaaacagacacaaattagaaaaaaaataaagcaaatgttgaatcacattctgagtttagaatagaagaagaacaaaaacaagttttctcgggaactgaaaaaaaaaagaggtcataaatattaatgtactagatctacataaaaaaattctaaatgcaggattttcataactctaaaccagaaatcattttagcttatcttggaaaacactaccagtgaaacaacttaatatcagttaattttgttttctaattcaatttgtgagacagcactggatgtattgagaaacagtacatctcctgatcttctaagataccatgtaacttgggagtgctgagaatatattacagcaccctggtaaaaacccatgcatggtgtagtttgaccttagtggggagctttagctttcaccatcaggttctgacttgctatttccttactgtgtaatgtgaaaaagtttttatcttggttattttttcttatctgaaaaaaggaagtcaaatgtcattgtccctttatctcagatagttattataacagataagaaaatgctttttacaagtcaaaaatgaattaatagattaatttaatgtattattctataagtttacctaaatcagaactactactactgttacaattagaaaatgataaggaagggaagaggaagtacatttagaaaactgcttttacaaaccaaaaacaagtatttatgaataaaagatgaagctgctgagaaaagtagaaaattacaataatatcactttattcaagaagatattgggcatgtattcccaaccagcaccaatatattatttttcagagataatgttaccaggaagaataaagctatgtttatttagacagggccagaactttttttaaaagataaactaaaataagtaagatactggaattgatttgaggaccctttgcaatctctttatgttctctgctttctaggtattcactaccagacctcgccaacctaaattttaactctctctttagtcttgttgaccaaaatgacttttcttcaatctaaaccatactgaagctgaattcaatctaactataggaagacattaacatggttcaaataaagctttgcataataactgtttctattatgttgatggtcttggaggtaactaactgttaattcatctttaactgaagaattattatagaagtattctgggggaggtgtttttttgttttggtttttgttttttgtagtgacatgtgctctcagtgtaccacaatatcatagccccacccccacaacataccttatgggccttgtgcataagcattctgtaaattataacacaggataaaatggggcttacttgtatcttctcctaatggaaagcctctcctttagttgtgaaaacttgaaattatttcctctcaatacgtccttaggcaaagggagctgtgttggcaaaagccagagagagatgatgcttggctcagagctgaatggctcaaaggtactttcaggataaaattgaacttctgtgatttactcatttgaaataatgagatttggagtgttctaatataatccacaaatacaagacagtaagatctgaaacgccggctgtagccctgagattaataacctctagcagtagttatcaaatattttaaaataagagacccttcctttatagacaatcatgggagaaagcccaatgttaaaacagagaaaagactatgtctctgctggaatcagggcaagggctccaagtcctgctctttccgcactcttaagccccagcagtggtcctcaggtccctccccagaacccttaggctcagtaaggcatgacctgaaatccattagccttacataattctgtgaaatttagaactgaagaatccagtttgttccataacagcaatttgactgaaatacatgagacaagttagagtggccaggccagaatactagaaattaaagtataataataattttaaaaaatgacataaaataaagctggtagctttcaccctaggcttccttgcagccccactctctttctactaggtcttgaaatttagaaaaggtatcttgaaatccctaagtattaaatagtccatacgtgaattttacaaatgtatccaagttcatatttgggaacataaacgatggtaaaatggttctcttctaagtagggaatgggaccgtgtggaaacttgtgaggggatgtcagaggtagtgcagtaaactgctgatgcaatacaaggaatgtccttttctgtgctagagctaactctcccatttaccagttgattaactttacgcaaaacacttgttattcagtttctccatccatgaaacaacctgtctgcattaaatgatcagacctttctttttaaaaagattactaatctgtattttatctagatacataatatttttgctgagttgaaataaactttcttaattttcatattcccttttcattataatctctatcctgagaaccatattcatattttcatcactgctgaatgttgtctccctggatgtcttcttagaacttgatctaagatgaatgttattctcccacaggcactttcagaagcataatccttctgggtacttatatccaggctcttcaagtcgccttcagttctttcctttcacttctcacatccaattcaactactccaatgtcttcattcattcattttttttattatctactttgtgatttgtcccactgaaagaacaagacccaggccatgtcctaatgaaattgtaaatctagtttctcatgtttggtcctttccttcttttcctcatattatcatcacagttcagcccacttttatcttaacgttttaaacaacctcttagcttattcaccttcctctaatgatcccacctttcctcagcactgtaatttggaattcactctgccattaagatgtctttttaaagtgggactctgataatggcagcatccatccccaaccctctgacacacactgtgtgttgactgcaaaataagtttataaatccagggttataaatgcagctatttaaggaacctggtaagacacataaatgtgtgagtctggttagggcacacagtagggagtaagagagcctagggaaaatttggagaggctatgtgctgcccagtgactttcaaattcaattaaaaataactacatctatgaaccagaaagctaccaattctttcattccaaacctcccttgcagccacatttgtgttgcagccacacaacatccctcactataatcatgctttgcttgaagctgttccaatatttctaatgacactgttctttctttcaggtgtcctctttcccagtgaatctatcctcatttctcatctcttccctgtcagctaccacttatccaagcactttttttccagtaagaattcatctcttgctctcctatatggtcattatattttatattttacatatttataaacatgacatatgtatttatgttccacaaagggctttgaatagaatttacacatagagttccctgggttgatgtgtttatcaaaatggaagataaagtgaattaattacttaaatatttaacactattgaatagaaataacttccccaatattgcttcatgatttagacagtctattaaatgtttaagcaaggcactagactaagtttattaagacaaattttggaatatgtgcagaaatatgacctggctaatagtacagagtcaaagctggttgaatggtgttatatagtggattcagattgatgtggcagtggtggttacactaggggcactaaggttatccctactggcactctgaggactctattctctaccacacttttttccattaaaaataccaagtagattaatatcatatttgtagataacacagggatagaattacatacgaggagaaaatatagcttacttatatccatgtactaaaatggaaatcagaagcatttctcttcctttgactcctcatctctactttctcttcagtaatccatactataaatgacatcaccattcacctagagtcttctcatgaaaatctgggaagcagtcttgactccagtcgtgcccacatctttgtaactaatcaaccaacaaacccatagaccctaactccttagcacatatcaaatctattacttatttttcacctctgatgttaggaaaatagtgtaagcttctggtatctttcttgactaaataattgttgctatgctgttttcttatctttggttctgcattttttaaatctgttctcttgccagaataatcttttgaaacaaccaatctgatcctgttccttaagtctttccatcatcttgacctttatctgtttctccagtttcatcctttaggttcccttgttgcattaatactcaattgcttgcaacctgcatttctcttacatacttacattatgcttctgcctgaaatgtgtctacctatgctagacaaatataatggcaccacaatgatgtataaatcttaatctccagaacctgtgaataggttggattacatgtggattacatgtgttgcggctcagaacataccccaaagtatggcaccctggcatgctgagtacttggaactgaaggaaattggaaaagcctcagaaacaaggtctctgaccttttcctgccctcctctctcacacccctctttctccccagaagcaagtcatagcaaccagaattgcatttctccaaggtctgtctagaaactaaaagtcttctcccctaaagtaagccataaaatgtagaaaggtcactctctcccttttcccttgaagactctcattgccctatactctggagggaaaaatgctacaaagagaagaatctgaaaaaaaccaaaaaaccaaaaaaaaaaacaaaaaaataaaccaacctttctggatttcccccctcagtctattaccattagattatactcttttgtccaatcacatttctacatggcggttcattcttcactgaaactcagtataaaaagtacacagttttccctgggtatttgggtcttcaactctgaaagtgcctgtgttacatgaaactttgattaactaagtttgttatacttttctcttgttaatctgtccttcattacagcagtgttggctgtgacctttacgaagggtgagaaaaagatgcccttattctttttgcccttaaagatagcaaaggcaattaaggttgaagatgttaattacgtttgctaatcagctgacctaactatagggtaagaaccctggacccaatgttgtcacaagctccttacaagtggaagaaaacagcagaagaggagtcagaggaaaatgtgactacagaagaatggtctgagagatgcaaggttactggctttgaagatgaaagaaaggagtcaccagccaaggaatataggcagcctcaaaaaagatagaaaaggaagaaagcagattctttgcaagtgcttctaacagaaatgcaccattgatgacaaatcaaatttaccccagtgggatccatgccagacttctgacctacagaagagtgagataatacattcacgttgtttaagctattacatttgtagtaatttgttatggcatcaatagaaaactaatacactacaatgtcactctagccaacactcatcactcaacaagactcagctaatgaagaatgttggtttctgtaaataacttatattacagggcttttaactattgatgagacttccatgtaaaaatgtattcacctactgagctataaatccctctagaacaaataccaagccttatttatgtttgtattcacagcatcttgcataggacccttagtagataatttactacttttaatgattgaaggtagaattgaatagtaatgtttcatgttttaaagtgggctgacaacatcaactcttgagtagagtacagaaaggctgacttatgagcagttcatgtggaaaaacttagagatttcaactgactaaaagttcagtatgaattgataaaacagtaacactgacaaaaatacatacacacattcacacatacacacacacacacacacacacaaccacacccctacctttgattttagatggcattaacagaagtattatttccaaaaccacagaatgcttccattttactatgccttgctcagatacccagggatagtataattaattttagacttggctttaagaggtatcctgacaattagagcatgccaagattaggagaaggagacaaccagcaaagagatggtaaggtcttcagcactgtgaaggatggtttgaaagaaccaaaaaataaaatatggaagagaaaaaatctgaatttgggtataggagttgctatggtttgaatgtgttccccaaattttgtgtgttgaaaacttaatcctcaaattaatacgctgactggaagtgggtcctttaggaggtaattaggattagataaggtcatcagtatggagcccccttcatgggacaggtggctttaagaagaggaagagagacctgagctggcagggactctcttaccctctcaccatgtgatgccctccacatgttatgatgcagcaagaaggccctcactggttgctagtgccatgctcttcgacttcccagcctgcagaactataagaaataaacttattttctttataacttacacatttatggtattttcttatagcaacaaaaaataaagatggggtggagaaatatatttatagaaagtatttttttaagtaaatgagaaattagacataatgtttttaactctagagaaattgaaaacagagcacagcacatcggataaattcaataactatcttaagaatcagcaaaacaacatgcagatggctgattggcaatagtttcagtaggcagattttgattaaaataaagaaaaactttttaataattaaacctctccttaaaacattatgactttatgaggtaacaaggtaacaagtacagccttctgaaagcataaacagcgtttacatcatcacccattacttaactagcagaggagtttgtttgaataggcatttggactaggagacttctaaagattttgtcaaatttgtgacttcattatttgttaattaagtccctctccattctaaagcaatttctgtgatttttctgattgtggtagacttcacaattatactgatttaaaacacattaccatgtactttctggctcctagtaaattgctattcacttaagtgttatctctgagtcctaaagtgttaacagacctaccaaattatgtgaggaatctcgccttcccccacaccccaacaagcttaattttctcttgaatatttatctcactctctcataactttcatataatttcaaactctccaaaacacacccaaaaagggagctgaaggacaggaagggattatatattttttccatggtatattctcttctaatgcagaaaggcaattaggcaaaacaagttaaaagcaagctaagctttttcttcttgagcagtgtagaacaaaaggctttatctgatttatgctaaaactagttcattgcaagcaggatcttaataccctaatcaaagaaatttaaaaataaattaaagaaaacatctcacctttgttacttagaggcaaaaattacgacaaaattatttcctggtcagcattcttagactagcctcagctattttttttttcttgaattaagaataatgaaaatcaccataaaatgaaacaaaaaaaatgtatcacaaaaatattttgcaattctctttctgcccccttccattttacttcctttctcaacatttgggatttaatgagctttaaaaatatgtatacaaaggataactgtctttgacttttttgatctttcctccatgtagtttgtgatttaaaaagttagttgtttcctttgaaaattaattttatttgactcatcattagacacccaatactctgccacatgttccactattgtgcattcactattcactagaaatacattacacactttaccgatattcatatacttcatccccatagctaaaagagatttttagattttactatctgtgctttacaaatgagacaaatgagtttcaaagaggccagataactttcccaaagccacacagcagatacatcatgaatctagggtctaaatgtgggtctacttaactccagtctccatgatccttggctatgcttgtgcaacaagatttcctcagcatctttcatgtaccaagctctacccttaattcaaaactgaaaatatcaaagcccctgccttcaggggtatcacattctaacaacagtgactgaccaataataaatgcaatccagctaaagaactttataatagaggtaaatattaggtataatggtgttcctaaaaaaagaataatccacctttcctagtttggggtaggagtgccagtgtgcgcaatgactgaatatatactgctaacagctaatctttgaccaaaaaagtaagattcagtctatcattggattctgcttcctctataactccaggaatcagccatgccaaatgtgctaagggcttccaactctgcacagatctcactggggctaactcaagggctggacaatgccatctgacaagttccactgacattaaaaaatacttgtctggtgtcccctatcatcaaatccctccttaagaacagatacatcagttaaaattatgtggcactttcaaatactatcatcatgatttattgcaacagatgggaccactgagagatttatctttggcaaggggataatttttggatccccctcaaatcacatgcaatatgtaaccatctatgaatagagcttccctagaccctaaagttgccctctcaggctgctgtcattactctttcacatctatttctacttggagaaatgagtaacaccttgctcttgcagtgacaacattacaatctcgtgttcttgtccccataggagcttgaccttatcaccctcatcactctctccctgctttttcttgtattcacactaatctttcaaccacttcctttatagttttttttttaaatcttaccatacatttccatataatttctatacctgagtctgtcatttctgaatgtctaataagaatactgtctattatttttcagtagaatccatggaccaaatttctaccccaataaagcctgaattttgtacatacaacatattcttgttttatttaatggttctttctccacaatttccagaaaaaagggtcattatcatcatccttttccattgcatcaagatatatttgtgccagattttaaacgtgagctcagtatttgctgtttagcttttccttgtctggatcctttttccattgtacattattgagaatgatcctaaaacatattacaaagtgtccataggtgggcattacatacaaagtttaaaagttgccacatattcaatttgatttttgttttgtctttttgtaaagcacatggtctgaactctacacaatgaaaattttaatgacctttacaacaagatttgaaagagctcagtgacatctttactaatgtgaaaactgacaatttagtttcagggatgaagggtagatctaatagaataactacattttttttcagtcctttcataatggagcaacttcttttaaagcaagttaataattattctttttattatcaaaaaaagtctttcaatgcagaagcattatgaggtgagttatcaagttgtacatgtcactgcaaggaaaaaacaaaaatcctcaccatgaagattaagtcctcagcttttggaggtcaaaggtcaaatcaatgagttgatagcactagtcacaaagtgactgggcattagatcttctgggggaaggagtgatctcttttaaagtacaggatgccaatctgccataacctagtgaataaaatcctctgttaagttccttgaaaaatctctattttagaaaatgcatcccaggtgattgtgggagttcctcaacttcagaatttagggaagctctatacatagagggttacatattgcatgtgatttaagatggtaccaaaaattatccccttgccaaagataaatctctcagtggtcctgtcctgttgcaataaatcaagatgatagtatttgaaagtgccacatatttttaactgatttatctgttcttacacagggaattgatgacatgggacactagacaagtatgttttaatgtgagtgaaacatgtgagtaactgctctgggctgtccctctgagaactactaggtagaacaatagtaatgatctcaaggtttgcactgatgtttgagcaactgttcagatgttctgacagggaagtgagctacttgaacatgtttgattaaagaatggttctcctatgggctttctctctattcagggaataacatgcttaaagtagttaaacaaaaaaaaaaaagaaaaaaaaaagaaataaactggaacctagcctaataactggcattcgttctataaataatgaggacaaatgccaaaccaaagagtcctcacattcatcagtctaggtgttggctttctttgggatcaatcagcttctctcttcttccacctcattggtcagtgcaaatccaactgctctttaagactcttaacttcagccagtcctctggaaaagaatgccactggtcactgaaagtaccgatgggtcagtgtaaatccaaccacactgctgagaaaacaattcaaaacgcatttctgctgactgccagacaaggtattgttttatttaaacaataaacacctgaaagacagctgttaaaagccatcacatcattcttttaggtcagtatagcatcaaacattatctgttcactgagtttagaggaagatttctggcagattttgctactagcaatctatgaaatcctatggctaacttgtgaactagggtttccctgtgaaatggaatcacaattggacaatttagggatttccatccctctagcagcagtttagcccaatctaaatttgattgtttccttaaatggagtaatttaattttctccaaatgtctacagactttataatgccaagtccagaaaatgaaagggaaaactgggtcagtttcccaggtaactcaagccaaagaataaaatattgctttgaaattccttataaagcataagttgttttaattttctgaattatcttattcattgtctcagtagtgtaattgtatagtctatacctgggttatgcaataaaatagtattttaaacatgaaagaaaatattagtctcagttcatagttctttgaatatccctgcattttacctgtttgaaagttaacacgaataattaatagagagtacttcagctgctcctattgtgaatggactatcatggggtcgtaggtacatggcaaacaagccaaacagaaagggagaactgcagttttgtgcaataggcatttatataagtaggtataatatgaatgcaaaagaatacatcccgaaaatggtagctattattatacatgtggctacatttcttaatataaaccgtgaaaacaaccattctgaaaagctgtgcctttacaccacatgtaacagtcccacataaagcagaatctccttggtgattacagtaataatgactacgattgaatgaaaccctttagctctcactctcttttcgaaaggacaagtaataggacatacattttaagcaaaatatggcctcaggcactgtagtactgttgatgctttttaattcgaagatttcctaccattgtagttcttcagcacaggttctatggcttaggacagccggctgtggacctggacgcactgataagtcatctacttggacatacaataatgtatctgtgtgctgagaaagaaaaatcaaaggcttttgggtgtttatgcctacttgatgatctcggaagaatgaatcaatttatatttattttagtgaaagataagctacatgaccataaaatataagatctacttcattttttgaaactttccatcacaaattgccaaaagatccttcctgaaaacgtcgcaatgaatcatgctattcagaagccaaacttccaggatcctcttcctgttacttgtatagacacagagacatgcaaagattaattactgtccctttcttaaagaaatattcatttaagactgagataattagaaaaatgtgaaaagaaacctttgaccatcagtggttgtgaaagtggtttttaaatcttttccaaaatttctagaggcttcttgcattggacagggaatgagaaagataaaaagtgtcaaatctgaggccacttgacccacaatacgatacaaaaacttttttgttttcgttgactttgtttattcttcatagaaagatttaccttggagcaaaaaggaaaaagaaatttaaaaattagtgtactatgagaaagaaaaaatatccaaagtaaaacccaaaggaaacttgacaaacttgtttagctaaccaaccagttgatcattaaacaagaatttattgagtatctatttgtgccagtcactgctctagggacccttgagacacatcagggcagggtagagatttctgccttcaccagattccttcctctggtgaaaggaagacaaataaacaaaataaatgagaatttttttaaagtatgttaaaagatagtaatttctatgaagagaaactagatcatggtatggaagttcaggagacggccaaattgcagtattaagcagggtggtcggttttagtctccttaacatttttagcaaaatcttgaagtatgtgagaatactagccaattatttaactatttcaagataattatatgttatttttccaatatagacacctcagaaatatatctacttagcttttccttgaaaatgtggtattcagataactaggtgtcagcagtctcaactatatatcattctgtgaagtcattagtatggcaaaacattaatttacaaaaaaagtttcatctcattggtacctccagtccatgaaaaaatgtctatctccctgcctccttcaaccaataaatttgcatctgaaaaccagcattttaccaatgatttcctagggttgctcaaagtggaggcaagcctatttcatcctcattattgtatgtaagataaatgttaaagtgtaaagagtaacagatatctaaataattttgattgaggataatcaatctttaatacttttttgtacaaatgttctctgtagtacggatcatcaggacatgggtgtctagttagtttcaaccaaagacaatgccagaatcataaataatagggtattaatatgatggaaagaagatattaagataatgatactgtttttgttaaacctttggcagattacagatcaatcgttttaaaatcatttaatccaaatgcacacggtatcttttccttattgtcaccattaataaaaagcctcctctatgcacttttgcaatttgtcatgtaacattagcctcagtaattgagtatttttattaatccatattacagatcataaggttttgatatttgaggctaaattatttactcaaggtcagtaaggaacaaatctggaatatgaacccagctcttatgacttcaggactattacccatcagttacaaggtggagttttactccctcaaatgaaaatcttgataatgagagacaccggcattctagataaaaatctgtgaatggtttcctttatactaccactaaatttattgactaagaataagaagatgaaactctgtttcatgattattagtgtttaactgaagaaaaatctttgaagtctccttaaggttggctattctatattatgatagttattttggttcaaaattgtacaaagttttgcctatcataataagcagcgtcacctttcatgccttgtaacacaaagagggacaatattatattattatatttttagaagatctctaatattcttctctgctccaaaatgttatgattctaattaaagatccaaatttatctagtttaagagctaaagactatagaaaattacattgttttttaacctctgaccagcacaatttaggaaatagcctcctatcaagcctaaaagtgttgatggttgttaaaaatctagattaaaaaagtacatttgcaaatgtataaataacataaagtcattattttggagaagaaataatcagtttaacctccattatgtcataatttgaaagttttgctatttgcaacatatttcagtaaaacgcatctaagtttctattcataccacctcattttttaaactattaaagtacagagagtcctttctgtgctcctctctgaggataagttagtctacaacaagtttagtaaaagtcttgtttagatgatcagtttttcaatgttatcattgtttaaggaatgtataatgacacagaaaactttgcttcacagagccaggattacagaaatacattcaagctgggacttttattagtaatacatgtaacaagattggttaaatcacagcaagagataatacataagcatatactcttcaattagtttttcttggttctactcagaactaatgaacatgtaagctaaagatgaactagtaaacaaacattgaattctaaatagtcacatagccttctatgtgtactgtatagataaaagtagatatttaatgtctgatattataaggtgaaactccggtcttcccacggtctgcggctgtgagttaaggggatccagtattgcaagagtagaggtaacacagtagaaaatttaaacaaatattcttacttcttagtttgtatatgcaccaaacacaggcatttcaacagtaagggtctgtcaacattcacaaacttttctgaacaaacagatgacttattattatgaaactaaatgaggaaatacaatttaagaatttatacagaagaagatacatatcatattttaataaccaaattaggtctatatcagaaatcacagcaaaatatattttaaaaagcataaaacaaatatgcattaggattttagtaactggaagttgtgcacttcacagacaaattcgctatatagcaacacaggacttgaaaatggtataaaaataaaaatcatggaaactgtgtgatctgaatgttgtatctttccaaaattgataaactgaaatccgaacccacaaaatgacggattaggagagggggattttgggatttgattaggtcctgagggcagagcctttatgaatgggattgctgtccttataaaagacactccagagagctctctttctccctttcaagtgaggacacaaagagaaggtagtgatctatgaaccaggaagcaaaatctcactggacaccgactgtgtcagcccttggtcttggacttcccagcctccagacgtttgagaaataagtttctgttacttacaagctacccagtttatggtatttttatatagaagcccaaatggactaagacaaagacaaaagaaaatgtattaaaaaaacaccaaatgctttattcttttctaagtattaataatatcaaatctattataagagtaagtttaatgaaatattattgtggtatgacagtatagataaaaatttaaagcacatggtaatattagatattactcatcaattagttcaggtggaagagttgtatccaggtcttaacaattacaattagctttaacaattagttttgagaaaaatctatctttattacttttataaattatactaatttaagatctactcttcacaaagagaataaggcttatgcactttcagaatgtgtaactatattcttttcagttctacttgtaatattttgctcttctagtaacatgagaagcctggataattaaacagtaaatgtccatttgactctttaaaatggacagttgaaaccaccgcccccaaacaaatacatttaagtcatgaaaatcgcaaattcaagatacaataagaaaaatgttctggaaatacaatggtcaaagagaaagacaagctttctgccctcatagagcttacactctactaggaaaagttagcattaagtataatcacaaatacaaatatgtaattacaattatgatgacttatgaaggaaaagtacaagcctccaatcaaagtgccaacattcgctgataattattaacttgtgctcctgagctattaaccagctattatggcttgattttcatgtataacatattttgacttttttgtaatttaaatagtcattcatttctgataagccattaaagtaaaatataaataaacaatcaaagcaattattggaatgaagtgaccagttacacatacataggaaaagaaacaagaacaaaagagaaaagacatacttcattcaaggcaaacagataaacctaaattctaaatagaaaggagaataaaattagcattatcaatgatcctaacaacaacatcattgacaaatttcaagccccaaaaaaatgtgatccaaatttcatgaagactatttgaatccatctacccacaaccagcaaaagtaaggttggctttgaataacagatcttcagctgccccaaagaaaactataattcattcaaagtttattcttaaccatatccagttaaaggtgacatatctttgtttaggaatgtaaaaaacacaagtaacagactgactctaaagtttgaaacaggatgactaattaaaaataggaggcactatggcctatgagaagaatgagtaaactcgtgtttaattcattgtgattctgccagcccacagcagtggtctctaacatgtctccagctgacttcgccatttttgtcatgtacacatgataagggattttgcagtttccaaaccctgagttgttatggagcacagaaggatcaacatcaactctgtaaggacacatcacaaagtgagaccagtgcttacctcgagagaaaggacttgagaggaggatgaagaaggttatcaaaaggcatgttctttttacatgtgttaattattttttaatgaaatatattcatctatcactggacatttaaacagttagaaaatatttaagaattcataaagaagaaatcaaaataatgaagatgttcttgaatttatttttttatagtctttttttcataaagaaagacattaatccacaaaacttcattccagatcccctgaattcactactcacacaagagaaaagtggggaaattgagaaaattgctccatgattatattgagatataaaaatttaggaaacataagtttacactgtaaatcagttatataaactgtccagacttaaccccgattttatgcacaactaggatttaactccacataggaaattgcaatgtaaagttcctaaattattttttccagatttttttttaattcctccaacagatggcacaaggtggggatattcacataagacagacttggattgatgttatgctttcctttttctgaattcctacttcactttgtaccagtctcacagcacttccattctgtcattcattctaacttgcccaaatgttttcatttccttgttatatgaacactctgtggatgccatgtcatagtcatgattgtatttctgctctagaatatagatttgttgaattaatctgcaattagagaagacttacaatcacctttctcatttctctacatctaattaaacaatatgaaatgggtaccaatgtgatttgcaaaatactcaagtccatctaaaaatcttctctctccatttaacagcaaaaagcttactcgtcccaataatagaagaagaatgcaatgaaaaaaacaaattcctgtcctctgtgtctttgtgctgattgaggaacaaaatctgatgaaaactggtgaagttaaaaaataatgtttgacacacatgccaacagaaaacatttaagactgacatagaaaaactaaataaagttaagtgacacttgacattaagtacaccaaaacaaatatcagctgagtataaacatgaactattccatatgtagaaaatggttgtataattaaaaaattattttaagagttactttttcacaaaataacaaatatacgagtgtatatacttagaaattgtgtatttatacatgcatccatacaaatacacatatgcatacatacaaacacatatacatatactttactcagccagtaagataaagtatattcttccctctatgccatccctaagtccacaaactaaagaacatgatgagaaatgcccacttaagagaacgcagtggatgagattttggcctcaagtaaaaatgtttagaaagcactcaaaatggtacacaaaacctctaaaataattgatacatactgtcatttgcatagttgctagaggcttaatatgagattaaattatactattgaaaatagctgccaaaaccaaaactgtgataacctatgttgttggatcaaagtattcaaacagcatttgtttctaaagctctattttacacatttaaaattgatatcatttcttacatattgcctggctcatgttcagatgctttttcaagcagaaaagttttcctgctagatgacacaaacataaaggtgcagaactgtgaactgtggtcccaattcaccagattaacactgagaacacaggaaagaataaagatattcctgcatttaaactaataataataattaaaaaacagaaactaaatagaaacattcactaacacacagttaaaaatggttgatttaaagactattctatatgtttgccacagctgcataccacttacttccttttaatgacaacattaaacacaatgaggatggttttaaatggcaaattacacatgcttctggatttcgtaccaacatcatcaaagagtacacatgcctgacttaccaagcaatgcgggaatgcatagctagttgataatgcccttaaaacaaagttagtatgcataaaaagaaatgtcttgctcctctgtttgtctctttcttaatactgcctttttaggttactacagtgttcatgtgcataaatgacacctagcagacaacaagatgatgcacccacagcagtaccatttcagtggtgcacatgcttagacttatgtctcaatacagaatggctagggcaggtgtgctccagagctgaatatttgaagatcacatatttacagttcctacacttatttaagtaccattaaatgatactgcagaaactgacaccgaaacttgtagctaatttctaaatatattaattatgtgagcacctgacatgaaaaagatcactctaaagagaaaaaaaagggtgggggcgaaaatggaaacatattgatggatttttcttatcttaaatttataaaatatttattaacacatatacctacctcccagtgcccattaccaatgccaaaaggtctaaatacatttatgtaactcagacacactgtaattcatacagatgatattaagaagaaataaaataatgtaatacctttacttttacctatggatttgatgaaatgggtccatgaagaaagggtttccagacaaagaggataaagaggagaaaaacaacaataagtattatgaacatatgtaaagccactactctctgaaaattaaacaagacatgaaagtataaacaaggttttgaagacaaatggagatgcaatcaggacatgttgggaattctgccttttttgaaggcaagtacatgcaaaaaactgaaaggcccatgctcagttttaaaagatcacacaaaagagagacatacaataaatctacgtagagaaagtattgattctgtggaacactatactcagcattctacaagccagaagccaaagatgtctgcatgttcccaaactgtcatgcatggatgaaaaatggacttattttttggatacagtggtttaaactgaggatcttctttcagacagcaacttctgatggttctcggtttttctttaccataaccaccctttactgcatatgctgataagtatatagaaactttcaatcacaatttcttatgtctcatttatttgcaaatattataatgcaagaaatgaaggaaaataaaagccacaggaacaaaccaaaatcaaacgaacaaagaaatggaagaaaaacacatgaaaaaatgtgaacaaaagatatgtatttaatttgcagccatataatttgcaagcatttgcccatcctttgcagtgatggtttgaaagcagctacagaacaagaaaacactgaaagcagagtggaaaaggaacagagcccataccttggtcgcccatcatcaggtgcgccagaccttgaagggaaacaagagcacagtcagcaataaacaagggagcatgggaaggcagggttgtcacggtgacaaaaatgttcagtgacagacatctcttttcctatgagacatgtctgtatcacagaggcaaatcaaaaagcattctttcaacccctggttggaatgctttggggcaaagtgttctagaactgcgttttaaacactggcatatgctgcactgtgtatttcttccatgcatcagttggaacaaccaagagcacaagagcatgacttaaaatccaaccaaacccctcaatattacatctgccctctgtgccctttaatgagactgttttgcatattgcccccacagggcttgtaattcttcagtgatgaaattacatttttttaaaacccaatggaatacatgaaacatgggctgggtctgatctttttcccctcatcaaaaaatgagcattttataattaaatgaagaaaaaaaaattgtagtcacattgaaatgataatgcagaaatgtctccttgtctgacacatgtagcggctgactaggcttgttcaaatacaaaatgatcattagacatgcagttgtaaagctagaatttactacaaaaaagggtttttaagaaacaatgggtcagctgcaaatacactaaagcaattttcctcagagaacaaaattatttgagatttcacctaaatatttcttaaatgctgaactctaagttagtgtaaagatacatattacagatgtaatttcatcaaggaattctttaaaggacattgaaattcctttatttaatttatttattatttcctgcttgacaattcacttcaaactgaagagcacttctcttctaaataatactactaacatgctttcaaaaattcttttgctattcaagaagttactttttactgaaaggcataattcctagctttttattttaaattcagaaataaagctatttctctatccatgtatatgtctacaatacgggaaaatgttagagaaatacacatttatcagttttaataaacttgtattttcaatttccagtgctatttcagatatatttgaaactttatttgagctatataacattacacattggtttcatcagtatttaaattatctgtgttgttttcttaaaattttaggggtattcaaacatctctgtaggctagatataattacaaataatcatctaatcacaatataacatgaaagttattaaacacagtagtgtgatgcctctgaactgtagcctctctgtattttctgagtgattttaacaaaaagttcacacaggcagattcaacagcttatgatctattgataattcatagtgttttatatgctgatagtggcttatttgtccaggttacatattttttcatttaatttcacttttaaaactactacagatatttccaagtaacattttataagttttatggactaaatgaggaaattgtcttgaagatctaccttttagaaaatatattaggtacttccaacggttttgatgctacatcaataaggatggaaattcactaatccccaaagaattcacattcttcctgctagactttctacctatactgtaaaggtcatattatagatagaaatattaaaattatgattgaacagactttattacaatagcttatgggcctatattctaaaaataaatcttaccatgggatgagtgtgtgtgaaaagagagaagcattcatgctaattaggctgattttaaagcctcttgggatgcaataggattttaagagaaaagaaaagcatttcacaggatggataaggaaatgcaaaagaagttgaaaagatacctctaaaaaataacttttaaactcagttgacatgcacaatataaatgagactgacttcaaaagatattaggcctgcagggtaatatatcatttttatcaagtatatactcacatgcaattaaaattatagtatacaaaaacagaagccatatatggatacaacacttagaaaatagtaatttatgatttcttttaaagttttaatctattttatttaaataacaaaacagaaatgttcagcagctaagcaattataatattatccatgtacgaatcacaaatataatgtttacccctgctactggtcaactctgtattatcatgaagtgttctttcttagatacatgaagtcttggtaaccttaatggctatttatctgtaacctgggatagggagtctttttctaagaaatccttcattctatggaaatgtacatttacagaatgactatatttcaaaatatggtagtaaaataaaatatactaaatgctgtcttcccatatacaaatattagtaaattagtaaatctttatgtaggaactgttaatgctgtgaatatataagttgatagaacatatataatttgataaaaccttccctttcaccattcttttgttatgccttgttctttttgcatgttaacactttgaagatttgtttgtagcacactgactaatgcatttaagttcttaaaaaatgagaataaggaaatatgttttaatttgctggattctacaggaaaatatataagctatataacttcttcaaaattccttgacagagataattttttataaaagactgaataaaatatttagcaggcaaaaaatattacaaatatacttaccaggaatcatatcgaaatgctgtatgctttcatgtccactggccaatggcttattttttaatctaaatttatgtctcttacttatactcagtactttattgcattctttttatacatccaatcattttaaacaaaccaatgggcttgaaatgagataatgctaaattttgccagaatagaataagtcattttgataaaaaatggaaaaaggatcatgcactgtcttatgaaactacaaagaaatattttgtcttttaaagtaaaaaaagcagaattgttatcatttttctcatacagaacactgtaataactattctaagcttcatatgggatgctgaggtctaacaagggttggagttaagcttgaaaaagtttcatatacttgggatggcagggttgagaatgtatgtgttctgtatgaaaagtgatacacaatccagaaaccaacaaatgttcagaaagaagttcaacttaccatctaacttcaagatgtaccctattagtactaagaaataaaggacaaatgagagttggaaaaataaggtagaaagcacccaccttccacattgttgtcttctgaaagcacatgacaaggagggagagaaaaggaaaaacattcattaagcagcatgcagactggaccttgcctttgcatgtcttcctcatgcaaggcaccaaacacatcatgcaagtgctccatcactatcattcaagggggaaaacaaaatcacagggaagcaggttccctcccattggcagcattgataggaagtgagacaaactttcataatactgccatgccctgtgcaaagagtttttaaaaaaatctttcaactacccagtataaagcaaacattattgttattacatgttgctggtgtggtctttctaggcaattatttttaaaagcttttttgttttctttttaacaattctaaaaggttctatttccacatactgatttggccttagattttaagaagtctattggaaagagctatgaaatttcacttaaagatattccagttctaccaaatatattatccatatgccattactgccttttagtatttctaatacctcaattgctttccttaaagaaaaacaacgtaactatatggaactaaaatctgcaatttatttggttaatttatagcatattaatattgtattgcaaatgagaatagtttattggaatttataaaaatgctaacttttaaaaatgttaggtaggaaagtgatcactggaagagaagtccactgggaactgtccataaggcaatttggtttgtcgtgatttaaaaactttgtacttctgttgaggatgtgaatatgaatttgtttgagacaatgaaaatatttagctcaatttctcttatatttctatatatctataaaatacctacatgttttcatatattttgttagtcatatttccatgtgtgtacctatgtatatatgtataaacatatatatccaagcagatttgtatttcccaagataatcaatataaatatataaggtttaaagtattattagtacctagtggaaaattcaagttctatttgagactcggggcctgcaatcccggcaagaaatggaagggaaagctgtcttaggggactagggcaagagcaaggtttcagtagttatcaaaaatgttctaatagtaaactctacccatgttgacattctagtctcatccttattttttgtttaattaattgtactttataaactcatcatctgatcagaggtgtttataaacatggcaacatgcaagtatagaaacttgaaagcaaaaacaactaagaatgtaccatttgattaggttcacctaaaaccttcttaattggataaagttactagtgaattaaaaatcaacaattttgtttaaaacatttcagctgaaaattgaagtatcaacacaggcacatctactgatgtggtgttagcatgtaatagaaaatggctggtggctaaatgtgggtaataacatctttacacaatacttggttttccagagtttatttttaaagaaacaacaaaaaaaactttcaaatatttggtctgtgatattgacttctagtttgtttttgtttgttttttggactgccaatttattaaacaaggaattaggctgaatttgttacttttcagtggtgactttgatgttacacaaacacaaatattaaagttttgttttactgcattatattggacataatacaaagatataaattattgtaatgtttaagatatacttttcctgtatattaactttgaaattgtatcttctgtttaagatgcttacttaacaagattatttaatatgtattgtaaaataataaaatcagggaatttagaggagagtcatgtgccaagacagtatgtcaattgctacagcattatttaatttctgtaaagacgggcaaatatggttgtgaggagcagtgcttcggtagaaattttggtaaagtgtggcctaaaactacaattaaaaaaaaaggaaagaaaagcaaaccaacaaaatgaaacaggcccaggcctgacaccaactttaggaatgcactaagtagggcattataaaaggagttcaaggtcactgattcagtcctgacggcaagttctcctttcatgaccatagatacaagcctaggttttgccatggatcctactctaccatctagcatttttttctgaattcttattcataatgagaacaagcttaataatgggaattcctttaaacgatccaagtcatgtttaatgtgtaaacaaattctgactcgactaaatccagaaaagtggtctgtctcagaaaatttagatttagaaaaaaaaaatcaaagtactagaataaatgggtgatatattaaccactgtttaaaaaaaagatggtgatgatgatgaagacaactggcttggagcagactttccttgagtttccatatactttcagattcaatctcagaataaaaatcctctttcctcttccattctattctattctggtatccatttgctaactttacataatttaaaacttgttaacctaaagaaaatccctacattatttcagaatttggacgtgattataactggtggtagctccagcatttacaaccattctccaggtatttttttcccttctctttcctttccattttatttctgtactaaataataaatgtcgagtcaaaaaagaatagtttatctcctcataacaattttttctttatctttgtaaattcttatacacacaaatgctactttgcttttgagcagcaacaaagacaggtgctgaattttggcatgccacggtgtacaggtaaagcagcatattttggtttagtgtaaggtagaaagcagtccatccggccttacctgtggacactgtcaagttagggaaaatctcttggtttgcagaaaaccctggcttcttaattctgctgacctaatccttgctgagtaaatgaagtgcgtctcttaatcattaactttactacgatgaccacgccacctataaagatcacactcttgctttcttttcattggaaaaataatgaatatagagctgtgaaaaagatactttacattttatttttctttcagataggatgggcttctctcacaaagatgggaattaggcaccagaatatcaatcatgctatgaataatggctgtgtgctgacaagaaggcaagcaacagcctgttttaaaatcactgtaaaagagcatcttcacaaaatttttatcttcggcccccagcttataagaatgcaaggacagtaactttagtttatcattccagtgttctttgcacatactcttaagtatacggttctaggaaaacaaatgaatacaaaaacaaatgtgcttgtttcaatataaagaaaatcatgaccagtaaaaaattaaaatttggaataaaatatcacaaaaatctcctttctgtataatcagtgctaaagtttggcaatatgtaagtctttctctaaatgtacagacagtggtccatttagtgctacaacttacattaaaaaatgaccaaaagaagcttcctgatatcacttgggcattcctttacttctttaatttttggtttccttccttctctgctagatgcctgtgactggctcccctcattttccttgattccctctctcctccatcaaaactgccactactgcgagtagcttctgtcccagataccagcactccaaggtatggcatattacagcaaaactggtggtggtaacaggcagtggaaagacagatgaagaataagattctatttccttcctccatacagggagtgtgctaacttctatccacgtctctctcgcccatcacattacttctcaagcctgtactcctcattttggagatcaaatgccagtacagcagagcttagttcccatggtggcacaggatggagctttgttttttcttttggtattagcagtgaaagcctttaaaaaacctcaatagtctgggaatgcttcaagcactgggaaatggaggaaatcattgagactgtggattaaagcagcagtcagctgaaggaatagaaatgcggcccagaaccaagacgatgttcaaagagaaaatgaagcataaaggtccattatggagacttagggaaggaaagaaatggtcctggacaggaattgggctaatttcaaacatgctttttaacagaggacatcacctcctttttcaatcccagctaaataatattgcaggacactcccacccagcctgcttggagtactcatcctaggaaatatatggagtcaactacaacaaccagtttttctccttcttcactgctcgggaataaaaaatgtatctctaaaccggatgcagcaacacagatgttcctggcatcacactagaaacacttaaaacaatttccccccaaaatattttgttacaaagacatttgtggtatttaattcaaaatgttctatcttgttaatgacaattaaaagaaagaagagaaaaagagaaagggggcaggaggaaggaaaagcaagaaagcctaaagttattgcgatttatagtgattaagctatttgatgaacctgatgaaatttaataactgttagtcaacatattataatataaatcgaatgactcacataagctataatgaattcaatttcaaattttcatgaggaactactacaaggattttcaaatttgttttgctttgataatctcagttcttccccaagtctaaatcttgagagttaacatttcaacattcatttcaatagttggacttaggaaggaacactgaatttaacagtgactgtaaacatggtgacaagcacagtctacagtatgtgtgctcacaccacctatttttattttttattgctgagaaatgaatgcttcctgatacggaattgacagacaacactgagcagagtgcttatcacataccctcccaaccaagcttaatcactgttaaacaactctcctaagaaaggtggctcaggtgagcagtgctttcctttctaagagtttgacgtcatcatattttaggatacagagcaagaaagctcttggactgaggttaagagagtgaacttaaatacaccctacctactttcccaacttaccaacccttctagtggttatgtggttttgacttctttgttaacagatggacaggagacatcctttggcctgtgtattaccatcagagaatattctgcaatgtgttctaggtttgctatcattaagatgaaaagtaggtgaactcccactaataagactaatggtcttcatttgaaagagctgtcaaatgtctactggtatataaatttttttcaccattttttttcatcttactacagatgtttttcaactaaatattaaaatactcttaactttattattctatacctgggttcttagacatgtccaaaacaaatctatttaatttatctaagaaaaggcaaaaatactttgtgatgaaattaaaaatatgactaaaccacattgtaaaaaggagtcttaagtttgatgcttaaaaattacatttacatgcagtgtacagaaaataaaattatttatatgatatgaccgacctgacaattatacattctttttatatcaaagaaaaaatgaaattttatatcaaattaaaaatattttatattgttatcttcacttcaataggaccctcacatatgtaacaaacagcttggaaggaagctattccttggaaggaaaaatgcacagcatattaaaaggatttgatttttcatttcttcagagctcttagtttttcattttatatggtgttaaaaattcactgtatttacatgtgtcagtttatgactaaattaatttcaaagttttatgaaaatcactgaaaattattttaaaaggaataggccattcttagctaaataaattagatcatacattgaaattttccaggaggctctcgggattgattaaaatattattttttttttctggagatggagtctcactctgttgccaagactggagtgcagtgtcaccgtgttggctcactgcagcctctgtctcctgggttcaagcaattctcctgcctcagcctcccacgtagctgggattacaggcacccaccaccatgctctgctaatttttgcatttttttagtagacacaggatttcaccatgttggccaggtgcctggccaaaaaatattacttataatcaggctgagcacggtggttcacacctgtaatcccagtactttgggaggctgaggaaagtggatcacttggtgtcaggagttcgagactagcctggctaacatggtaaaaccccatctctactacaaagacaaaaattggctgggcatggtggcacatgcctgtaatcccagctactcaggaggctgaggaaggagaatcatccttccttcctgctcacttttggtttccatttacatggaatatctttttccacctctttacattaagtttatgtgagtccctatgtattaggtcaatctcttgaagacagcaaatacttggttggtagattgttacccattttgccattctgtatcttttaagtggagcatttaggccattgacatcaatgttaatatcatatgttcccacttacaagtgggaactaagctatgaggacacaaaggcaaacataatagactctggggactcaagggaaagggcaggagaggagtaagggatacaagatacacattaggtacagtgtacactgctcgggtgatgggtgcaccaacgtctcagaaatcgccactaaagaacttatccatgcaaccaaacacaacctgttcccaaaaatctattgaaataatttaaaaaaataatgtgctagaaaaacacacacacaaaatataactactggtatcacttttttttcttaacagcaatagaataaatgagtaagaagactgtgagaagactgaatgatttcatagatcctgctgcaagaaggcagaaaaacctcagagaaaaatactattttcttaattgcatttatttgttgattctataaagtctaagaaactttaatactgcttaatttcctttattaaagaaaaaaaaaggctcccagtcctcttctctagattgttacaataaattgcttcctcaagaaaaaacaaaacaaaacaaaacaaaaaaacacgcatttagaaaatattttgtcctactttaagagcaaaattaggtccaggtttataaatgtgtttacccatgggcattctaaccactagaaatcaaagaaagaattattccataaatttcttgctgtctttaaaatttaaagaaaagcactcgtttcatacccatcacataaattgtgccttccttttaaaacatctgaaacaaaatgacacttttgttcaaagccaaatattttggtaggtgagacaatatattatgaatttgccacataaaatatatttgctctttcatttgagttataaaatgcaaatttggtaaaaaatattactttcattccccttacatactcgctgtgtagtaaatctcctgggaactgagcagcaaattataattcttttgcaggaagaaaaactaaatactatacaaactgcaattctcttttggaaaaaaagtgttttgtgttacagagttataggaaaatagtttgttcataggtacaaccaattctatacttttgaagatattatatatgtagttatttgagttaatgtctagtgactaaactaaacccatatgaatattggtcatgtggaagagagagccatgatcttgattaatccattttatatctgttgatttactgatccataaaatcaaatcaacacaaatacaaatttctaggtaccctaatgattcctttttaatgttttcctgaaatgggcattcactacttaagaaaacatgctgaacagaaagagaaatttccttttgtaaccctaatatagcttcttaaaatattaattccataattcagagaagttcactttactttttaaaaatgtataataagaagacggtatacttaattacttcttcaaatttgtttaaactgctttctatgactaccggcaagtctgcatttctaccaaaacaatttcaagaaaatttaattttaaaaataatctcatcaagccacacctcattatatgttgctttaaaatgtgtggcaatacaatgataccattacttcaaaagctcctccctaaacatcagtaccagcatgtgtgtatctctctaacacatatgtgtatacatatacacacccaattggtatttcatttcataaacaaatccaaactgtgatatttttctcaataaaaatattttttctacaaaagttaacgtgaatagaagaaaaacatttataataaataatttgataagatcatcaataataacacaactactacatgaccacttttcctataaacattttaccttactaataataggcattaaataaattataaacttctcttttcctctttgtatctgttatttcaattttgtttgtacgtattagaaaaacagagtgttttctaactgcatgattgaatatgtaaccacagagacatatggcatatttctaagtaaaattaaaatttcagttccttagccatgttccacatgctcaatagccacatgtagccactggctaccaggctggacagcacaaattgtgaagctttcagtcattacaataagttctattgagcggtattaactacagcttctctgacaatatcttttaatatcaagctattcatataatgtacatattatttgttctttattcaaaaaaggaaataattaaaatgcatgatggttttaaaagcaaacatctatttagagcagggttattacatttgtgcaatatggagaactttgtaatatttccacttaaccttaaaataataacaattaggaaataaacctgataaaaattttattgtattcatttaaaaatgtgtttgaataattcaaactctggacaattattactcttttcatcataagtcttttcctttagacctcatagatgagaaaacgctgaacctattttgatttttaagtaaactaaactagtaatctaatatcgtcttactcttaagcccctcattctcgcagtatgcccaattagatcatttatcattactgtctttaagtctatgaccatttttcaatgtaagagtttaataagcttttaacagagtagttttaaaattaatttaaaaagcgcctttcatcctactatcttatataatgtattctcttataggtcaaagactttccttcctataacatgggcctctttttgaatattacaccatagaaaaataaaccaaatgagcaaataaaatagtcaacatttctgtaagacttaaatacagcagagataaggcaattggataaatggagcagttcacacctctagttaattctagaaaagtccaagatcctattaaggaactactacatagaaataaatgaaccaatgagaaggcaaataaaaactgagtagggagaatagaaaaataatccttaggctgggcgcagtggctcaggcctattataatctcagcacttcgggaggccaaggcaggcagatcacttgaggtcagcagttccaacaccagtctggtgaaattgcatgtctcttaaaaatacaaaaattagccaggcatggtggcaggcacctgtaattccagctactcaggaggctgaggccggataatcacttgaatctgggaggcggaggttgcagtgagcagagatcacaccactgcactccagcctaggtaacagggcaagactgtctcaaaaacaaaaaagtaacccgaatatggaatggtagaaaagcaaaagaaaaaaaaaagtggcaaaattatctatgggatgaaatgatgaaataaaaagtttcatgtcaagaatgagtaagatgtataataaaaatttataatagactttgccaagtctattttagtatttaaagtattttccaagtctattttcagtgttgaaagaatgctggcctgctccaaagattaaatatctttaatgattatagaaaactgacctttttatgttagattagtgacatcaaatctctattgatacatagtgaatgaaataaggcaatgcatttatacctcaatttcctaatgaataacatttaatctaacatttaatccatatgtcccaagcatatgagctgttgtttggaaaataaactaagtattgagaaggaaagatgatttccaaaagatactgaggtcatctgatattttatcagcaccatgctctaaccaactgagctaaccggccgactggtcatctgacattttagcccaaccctggtattagaacaacttgaaagagattacacaacataatgagatgcttattaatatttataatgaagaaaatatgtgttggaaagccagaatcagcatcctgactcagtactatcttatatcttgtactactagagaaaacacacttttacataaaataataaatgacagaaaaccttaatacatttctgacagtattgcaataactaagaaaaaaactagttgtgcaacatgtacagtaagtatgtgaaatggctaatagctgctagtaaatgtagcttgtggcagtacctagtagcttagacaatgtatatcttgcagctatctaaagtaaactatgctcaaaatgtgtaatattgaaaataatacttaacacatggggaaagcacagtggaaagagagtagaaaagtcactgctttctgaaatactgaatagaaagtgtcatcgtttttttaattaatatggctcagagcaatatgaaaactattctggactgagattgagaaaatagacttgataactttaaataggcctaataatagactatgagaattaaatcaatcacttgaaagtttgtaaacatgtatgaaaacgtgggtagtgtgataatttttaaaaaatgaataaattgtcaggaacaaaaaatacactaagaaactacgaatcattggagaatctaggcatttcttaccaatacttcaatgttttatctattcatcttgaagaagaaattggagagagcaaggtgcctctcgttacgagacttctagggtctgttatcacaaataagataaatctaatatactttttctaatatttaaaaatgtttctcaatgctaaatatttaacttgctccacagagcctggcacacagcaaaagaatgtaagaccccttattcaataatgccagattataaagcatcttatttatggctaatacgtatttaatgatgttagccattatattattataattaatgcttccttatacaaatcacaggctgcttaagagcaatgccttttccattccccttcttttgttcagcttctagcacagtatgtatatgtagaatttgcttaataaatatgtgttataaagaataattagtttcctacctcaatttcctgcttggcttctatgaaactatcagtagcatgggaatgagtatgtttcttttagttggcaggatttacttgccgcagtgagctttcttaagttgtattctcacaccagatgtaaggaactcaatcaactggacatgtcatttggggcaaaataaactgaaggagtttagtattagttgccatccaaatttcaggcagtcccagatttattagttaggcatttccaaactttctccatcgattgttgtttatgaagtagatgatgatgatgatgaagatgatgacaatgatgatgatgcagaatacaactgtctcttaaactcaaaaattatttccacttgtgtaatctcattcaattattataaagacatggccatgattagttgagagaaaattaactattaaagatccaattgggtgctaataaagtcatgcatgcctcagaaatggggatacgtttcaagaaatgcattgttaggtgatttcatccttgtgcaagcataatagggtgtacttgaacaaacctggatggtatggcctactacacacctaggctatctggtatagcttattgcttctaggctatcaacccatgtagcatgttactgtactaaatgctgtagacaactgtcatacaaggtaggtatttgtgcatttaaacataggaaaggtaaagtaaaaatatgattttttttttaatggtacacctgtgcagggcacttaccatgaatggagcttgcaggactgaaagttactctgggcaagtcagacagtagatagtgagtaaatgtgaaagcctaggacattactatacactattgtaaactttataaacatggtacatttaagctacactaaatttataaaaaatgaaaattaaggtatgtgtgctcgatggctattatgtcactaggcatttttcaggtccattacaatcttgtggaaccatcatcatatatggagtacattgttgactaaaacgctgttatgccacacctgacttcattgtcaatatcactatcagtatttttgtcagaaccattcaacaagactctaggaagttccaaactttcccatatcttcctgtcttcttctgagccctccaaactattccgatttctgcccgttacccagttccaaagtttcttccacatttttgggtatctttatagcagtaccccactcctgatatcaattttctgtattagtctgtttcacactgctataaagaactacctaagactgggtaattcataaagagtttaaattgactcacagttctgcatggctgaggatgtctcaagaaacttaaaatttcatttttagcaaaatgcctgacacatagcaaaaagtcaataaacatgaggaattaaatgaagaatgaatgacccaatggtaaaatcaggcctgactccaaattctatgttcattcctctgtattagggagttttagcaaacttttaattagtcacaggtaccctacaggcttagcagtatatttataggaagtaaataattgtagatttttaaaaaattaaatgtaggggctgagcgcggtggctcatgcctataatccctgcactttgggaggccaaggcaggaggatcacgaggtcaggagatcgagaccatcctggttaacatggtgaaaccctgtctctactaaaaatactaaaaattagctgggagtggtggtggacacctgtagtcccagctacctgggaggctgaggcaggagaatggcatgaacctgggaggcagagcttgcagtgagctgagatcacaccactgcactctagcctgggcaacagagcgagactccatctcaaaaaaaaaaaaaaaaaaaaaaaaaaattaaatgtaggtagccccattaaaataatgacttacaaagcttcatttagaaatcatattttttggaaaactagcattgtttcctgaatacaaactattgtttcatgatatatttagtaagttaacaatgaaaacatttttagtaaattaaataattttgtttacaatctaaaaatcaactttatttttcagaattttaatagatttatgatttattatttataataaaatatgtcaaacttaaacctatttttattggataggatgcaaatattgaacacaattagattactgacattttaggatgatctcaagcaacttttcttttctctaacaatttgccttgataaacttcaagaataagcaaggtatttaagatggcattctcaggattttggtccaaataattaattttaggtttcacttaaactagtcaccatggtacctaacacgtaaatactaaactaaaataaagctccctctaattaaaacaattcaaaataaccacatcaattatgcacaacagaaaaatacaattttaaatactgttttcagggatactaatctggtaaacatgacatacatgttctgattccagtgcggatgtacatttagaaaattcatccatatagtagttaactgagacatgcagaaacaacagaaccacccactgcatttagaattatatagctgtcaattaaatttttaagaaccacccattgcatttagaattataaagccatcaattaaatttttaaatgactttcttatgaagggattataatactagtcctgactttaaatagaacagacctacgaaatagaattatttcctatttattatttaattctatttatggctcccgaaattgtggctaaacttaagtttttcaatccatgaacttagagtgcagtttaagagatttaatattatcttatttaaaagataagaaaaccagggcaggcgtagtggctcacatctgtaatcccagcactttgggaggccaaggcggaggatcatgaggttaagagatcgagaccatcctggccaacatggtgaaaccccatctctaccaaaaatacaaaaattagctgggcatggtggtgcatgcctgcagtcccagctacatgggaggcttaggcaggagaactgcttgaacccgggaggtggaggttgcagtgaaccaatatcgtgccactgtactccaacctggtgacagagcaagactccatctcaaaaaaaaaaaaaaaagaaaagaaaagaaaaccaaaggccacattgtatgacacaacataaccttgtgctctctgggtcacaagtttgaatacaacttcaaaagaaatagtgtcaataactaaactacttaagaagcagacttcagataacaaacaagatgaaagttgcatactccttacttaaggatagtaagtacaacttggctaaagtttttgttttttgtttttcacattaattttagatgagaaactggaattctaaggtttggttttgttttgttttgctaatagactcctgtattaaaatacaaggggaaaaataatcaaaagtagccaattaaccaataacccctgtccccaaaagggcatctgaaactatgtatatcagaatttgcaaattacaaaaaagaaaatcaacaaacaagttttgccggcctgagatagagatgtattgctatggtttggctctgtttctccacccaaatctcatctagaattgtaatcctaacgtgttgggagattggcctgatgggaggtgattgaatcacaggtgcaaacttcccccttgctgttctcatgatagaattcttatgggatctggttgttggataagtgtatggctcttccccttcctgctctctctctcttctgccatcatgcaagatatgccttgctttcccttcactttccactatgattttaagtttcttgagacctcctcagccatgtagaactctgagtcaatttaaactctttatgaattaccgagtctcgggtagttctttatagcagtgtgaaacagactaatacagaaaattggtaccaggagtggggtactgctataaaggtacccgaaaatgtagaagcaactttggaactgggtaacgggcagaaattggaatagtttggaagactcagaagaagacaggaagatatgggaaagtttggaacttcctagagtcttgttgaatggtcctgaccaaaatactgatagtgatattaacaatgaagtccaggctgaggtggtctcagatgaagatgaagaacctcttgggaactggagtaaaggtcactcttgctatgctttagcaaaggagactggtggcatttttctcctgccctagagatctgtggaactttgaatttaaaagagatgacttaacatgtctggcagaagaaatttctaagcaacaaagcattcaatatgtgacctggctttttccgaaagtgtacagtcacatacgttcacaaacagattacctgatattggaacttatgtttaaaagggaaacagagcataaaagttttgaaaatttgcaactggaccatgtggtagaagacaaaaactcattttctggggagaaattaaagctagctgcagaaatttgcataactaaagagaagtcaaatgttaatagccaagacaataaggaaaatatctccaggacatttagtatatctttgggtagcccctcccatcagaggccttgaggcctgggagggaaaaaatggttgcatgggctagtcacatggcccagctgctctgttatgccttgagatatggcaccctgcatcccagtcactccagttccagtcatggctaaaaggggagaaggcacagcacaggccatggcttcaaaggatgcaagccccaagccttggcagcttccacatggtgttgggcctgcaggtgcatagaagacaagagttgagctttggagccactgcctagagatttcagaggatgtatggaaacacctggatgtccaggcagaaatctactgtgggaatggagcccacatggagaacctctactagggcaatgcagagaggaaatatggggttggagcccccacaaagagttgccactgaggcactgcctagtggagttgtgagaaggcagctactccagaccccagaatggtagatccaccgacagcttgcaccatgaacctggaaaggctgcaggcacttaacaccagcctgtgaaagcagccacaggatccataccctacagagccatggaggtagagctgcccaaggccttgggagccccactcttgcatctgcatgtcttggatatgagacatgaagccaggggagattattttggagctttaagatttaataactgccctgtttggttttagattttcatggggcctgtagcccctttgtttgggccaattcctcccatttggaaagggaacatttacccaatgcctaaacttccattgtatcttgaaagtaactaacatgtttttgattttacaggctcacaggaggaagaaccttgccttgtctcagatgagactttggacttggacttttgagttaatgctgaaatgagttaaggtcttgggggactgttgggaaggcatgattggttttgaaatgtgaaagagacatgagatttggtaggcgccagggatggaataacatggtttggctctgtgtcccacccaaaccttatcacaaattgtaatccccatgtgttggagttaggggagtggcctgtgggtggtgactgaatcatggagcagacatcccccttgctcttctggtgatagaattcttaggagatctggttgtttgataagtatgtggctcttctcctttgtgctctctctctctctcttctgccatcatgtaaggcatgccctacttcccctgcaccttctgccatgattgaaagtctcctgaggcctcccagccatgaggaactgtaagtcaattaaacctcttttctttataaattaccaagtctcaagcagctccttacagcagtgtaaaaataaactaatacgcggacttcacatgttaggctagtacaaaagtaatggtggtttttgcaattacttttactggcaaaaactgcaattacttttgcaccaacctaatataatcatattttcattttatagattagaaagctatggtccagagtggttaagctgctaataagtgtcactggcaacaagacatactttctaagaacatttctatttctctttttagaccagtgctatctaatagcaccttctataatgatggaaatgttctatgaaacttaggaatgaattatcaccctaagcaagactaattctctatatgtaactgttcacatctagaactgtgccctgggaaatatcccacaggccttgtagatcttgatgagaagcaatcatcccaataagaattcctgtttgtgaggacttctgtgtagctctggtaaaaataaaagaaggctcatgatcacctagcccagatcagtcttccacacaaaggtaaagaaaaatgtaatgtgaaataacttttttctgaaaataatatatgttgcagagacagtcagacatgttagaaaacagtagagagagaaaataatttactataattgtatttcctcatcctaagcaactccttacaacatttacttaagaagcaaatattatttttggaagaccctggcatacgatttctgacaaatgatggaaggaattggaatggagaaacgaaaaaccatcttgcatctctgataaaatcaaaattggcttcagcactcaaaatatgcagggcttggttgtttttgtttagacagaattaaaaaggaacttgtagatcttattttagaattgttttttcacttggctaaaacagtaagcagtataatctggtactataaaagcaggactatgtatttagtttgccaattgttgtgcaaaaataaaagcaaatcttggaaaaaaagttgagaagggctgatccattttaggcactggttacacaaattataaagaatgggtataactctcctggtgaagaaattcacagctaagcaggaaactcggggtctccaacacaaactactctctaatgtgacactgggaaggtctttccacattgtgagcctcagtcaccctatctttaaaatggagataatagaatctacttcataggattattttaaggacaaattagtaaaaatcacatatattatgtaacacatagctaatgaataatagacacccaaatactttcctacttccgtttattcattttgtataagaaaacaggataaaaataacttaaatgaaaccaaacttttaaatcttaacatatttaccaacaattttcttatcctatacttctatctggcaaaaggaaattgtatactgagtaacagcaagaatctgaatgccaattgatttccaaaatggtgcagtataattaggaaattcatgagtcaaattcctgtttatgcctgtactgcaaaggctaatcatttgtttgttttctataagaaggacttgattaaagcctctagcagcaataattaaccctgtgcttgaaggatgcagactcaactagcactgtgtgtgctaaaatctgtaattaatgcataggaatgcatgtaaattaacagatgagtgtcatttacactgatggtacaaatgcaggtttctttttttgggaattacttcagtgttttctgctaaccattacatactataaactcagactgatgtaaacagcattctaacatctacaaagagtctctacttcagaccatgatctagatgaggggttggcaaacttttctacaaagggccagatagtaaatattttaggatttcccgaccttaaagcctctattgcagctactcaactctgttattgcaatgggaaagcagttacaaataatacataaacaaacatataggctgagctcattggctcatgcctgtaattccagcaatttgggaggccaaggcaggaggatcacttgagccccaagttctagaccagcctgggcaatatggtaaaaccacatctctacaaaaattagctggtgtgctggtgcacatctttgatctcagctactgaagaggctgaggcaggaggattgcttgagcccaagaggtggaggatgcaataagctgagatcgtgccagtgatttccagcctgggtgacagagtgagacactgtctcaaaaaataataactagatatataaatatatagctccctctctctctctctcttactatatatatatatatatatggctatgttgcaataaaactttatcaaaaaataggtaatgagccagatttggcctatacaccatagtttgtttaaccctgagccatagtttgctcatccctgacctagattctaattattaggtaatacagcatactgtataatcttagaaaatcaatatttatagattagatacgggcactgaaatataaacctgatgtgaaaacctgacaagtttctgaacttaagttagtctccctcctcacataaaatttagataaaacatgacagactgaatttaccacgactttatcgtaagaaacaagtgactccaaaatatgaaagtacttcagaaaaacagatatatatatatatatatatatacacacacacacacacacacacatctttacttgtaaagtattattattattattattattattaattggtcatcttttcagctctatgttttaaggcacctagaggactcacttactctggaatgaccatagaggatacaaactacacaaaacatactcagagctgatccagtaatgctagaatttaagaaacacctggcagacttaggatcccatggggctgccatgttaaggaagcaatttctaaagtcagacccaaggtacactagtcatgagagatgtccgtcaagaagtccttcaccagtaagtttggaaatgctgcatacgacgctatgaacatgagcttaattacactatgagcattagtactaaagagatatttgtcaaaaagttcttgacaaataagtgtggaacacttacacctatttcagaggctcacagtgaattattataaacttaagatgctaagatgtcctgcataaactgtgcacctttgtccaatttcccaaatgtgtatctattgagattctttatcttgtgggtgaagccaattaacagagctccccaaaactaactttgaggaaagctttcatatagattattctgaacagttacattctttcactctgggtgtgagaaaactgccctactaaacttacatttttaaccacataagagcaaaaacactcatttaggtatttacttacatttaatttgtctgtcattataatggaacttttacttataaacaattttatggaacccaaccaaatttataaaattatttaaagcagtataaaaattacactcacctcaatatactttaaaaaaacgcaagacttattccaaacatgaaatatttctgatttaaactttaaaaaatcacagacaggtatctactggagcactatcaagacacagtgacttaaataactttgtgctgaaggcactaaaagctattaaatccaaacatttgttgcttttgctgaatattgcttaaactgtccatcaggaaagaaggttgaaaaataactgcatagttcatgactttcctatatatgtggctttctgattattgggtttcttctggtggctttttcacaaactatttaatcaagaaaggcaatcctattcttactgggcagggaatagctaagtaatgatttctcttaattccaaatgtttctttcatttgcaaccagaaatttcttacatgacaaagacaaacatttttgtccagtcatgtattttgatatagaagttgaatctccctttggagctaaacataaaaattaaccaaaatcaactcatatcaaaatcaacatgataccctttttctagcatttagcagtctagcataatccctgacatgtactacgcattcaataaatgtttggtgaatgaataaatgaagaaatgaatcagacatttgtcaaatactgtagttcaaatatacaaatactattattttaaaataatttatattgaataatttaaaaatatattcttagtccaaatatccaataattcaaaagatctgaaacagtgataatatgttattacagttattcatttcaatatcataaccattcttttcccatgcacggcaatggagaactaagaaattttattctagacaagataatatacccattcatgatacacagacactagatacataaaacttaattatagagcttagattatattctaaccagtgaatatgcttcttgtgatttttggaccctagaatccatcaattaaaattcaatatcataatattcccttacagaggaatagggcactcctgccttgaatgcttaggcaaaggtacgtatccaaataaaaccaatcatgttaaagctacgaagggtttccctcatttccagtgaaatagacatgtataatatctacttaacagtacacttgcaaattttttcacattagtgaaaagggaaaaacttgttttctcatcacgctgagtatcaatttgataagtttacataagccacaaaatattggtttcatttattcagacagataatatggttcctaccatattccattgccatttatgaaacatttgcttatctcaaaatacattaaaaaatccttcccacataatcctggcaagttatttattttattttaaaatatattaatatttcagaacacacttcccaggacatccttacaacgcatatggcacagacaccacatttcttcaataaaaaataaaagccatttgtctctaaatacacttgaaaagatttcttgaggtaatttttgttttctttactctcaatgaacagaattattaacatctgaatattgacaactttttaatcatcaaacgtccattatatattatggcaaaattaataaactgtaacatggcaatttagatagatccaaaatttcacaaatgatataagatattgttctaagtatttatacacataaatcattgctaatccctggatgccttttataagtaaaatagccagataacaaaagaagcaataaaaaacacacttaaaatatactgtgcaaggaaagtacaattgaatgcttttaaaaatatcagtactctgggcaggttaatatttgccaaaatcgtttgctcctttgaggtttgctggttgatctgaatttattggagttcatttcattgctttagaactcattagcattagaattctgatgattgagggagcagctaatacatactgccccatttaatcttagagtaggcttctaaaataatagtaagaattaaccactttggaacctcagagtagccatatcacaggcaaatgtctctttcaggcagtcactaattgagcccagttactttttatttgtccttcaagataccacactgcatagagcttatttggaagtctaattttttgtgagaactactaggttatttacaagtagggacaatgaaacagacacactttcccttggagactttccagaatactgtgagtttcctgaataggtatttccatgaattcaatatggcttatccaccaattttggatctggtggaatacaccaaaataaaaaggcttactacaaaagctgacaaccagggagcagaaaactgctagatctgttctataaacccaaggaaatatatataattaattagtccagcatttgttaataagaagactgttcttaggactgtcctattaaaagttgagtgagaggaacctgaaaatacctttgtcactattttgtccaattcacttaaattatatacataaattttattacatattcttatctccataataacatgtggggctcaaaagaaagggaaaacattcactatattcaaccatataatactgagttgaaatagggatttagttaaacaaaaaggatgaaagtgttgctggttttaaatgtgtctaatttagttacttacctttcatatcaattctgatgtttccaagagtcagataatggcatcaagaaatagacttggctgaacagtctacacatactcatactgaaacatactctttaaaaatattattaataaagttaataaaatcaaaatgaggaatacaagggacagagaaggccacaattctgatacaataattctgcttcatctctagaatgaaaaaatcattctcactctcattcttcctagtgcaatccagacatcctgcaaagttttcccatggtaccacgtttctgagcataatacatggtgtggtttcattcctactcaggccttcattctcccaggagcttcttattgtttttataataaaagtatcttctgacttcttggaaaaactaggaggtcaaaataaaaacttttcccagaaagcttttaccggcacagccagaacttgctataaactaatatttgctacctttgtatttcatgggttagatattcccacagatgagtggttccagagccacacacagccttttcttggtattatatgtctcatctatttctgttgaaagtgtgtatgtacaaggaagatttggggaaaactacaatttgactggagtttgtaccatcccctgggtatcatgctaacttacataactgtgaaggcaggaggagattaattgaagtaagaatatgtgtgcaagtgctagctatttgctaagcagaataacaacactggaactatctcctggcctgatgtttagagcaacatataaatgctctcaaagcttttccacttgtttctttttttccatagtaatctgggaaagtggttgcattatttcctttttttctggattctacaaatcttttaaaacatgtgtcaaggtattagcttcataaatacttcaagtaggaaaactatacagaagggaaaatagaaatgtgtggactttggagattgcaataaaaaagaaaagataaaaacatacatgtcaaattatatatctagttattttttaaaatcaatttatcagaatacccatttgacaatttaggctggctttcactggagaagcacattaactcagttaagtgtctgaatttcttccgttaaagagaaaaagaaggcaaagtcagaaaatcacatattaacaatgaattgaagactgtactggggcgtgcatgtatcacggtttctcacctttgttgctattaacattttgtatcggataagtctttcttggaagggactattctgtgcattttagaatgttaagtagaatccctggcactaaatgctactagtgtgccccgcccaaattcacccccaattctaagctgaaaagcaataatttttgtaacattatttcggtaacaacatttaacagcattttggtaataataagcagtcacacagaatgtgagtgtaagcgctagggtccatgctaataactttttacaaagataccttgtttattaaccacagaaacaatagctttagttctaattatcatctccattttacagaaaagaaaacagagtctcagaaatattaaataacctgagagttctagtctgtaatcagtggtcagtgaaattatgtcatggctgtttggaaagctaatataacaagacatttctttcatggaaaatggcagtggactgaaatttaatcagggcctctgttctgacctcagccaaaaaatgtgaggtccctgtatgtcagtagtaatatactgggaattaatgtattagattgtattcaattgctcaaggacagctgtttgaaacaatgtattagaaagaataggttacagctcaggataattccttggagatgtgccttgggggcaacctgagggacaaaaggggatgagatgagaggagatgagatgagaggagtactatatctgaggcacaaagcctgtaaatctgtgaatgcatatgcatatatggatttcacaggatcagagaatgtgctgacctttagtgggtaggggttggggtactaaacgtcccataatgcaaaggacagtacagtatgctcattgagctttcaaatgtcccgccagatacccaactggatgaataacttgtgtataattatctgagcctagaacctagctttaagtaaattgaacaccaagtatttttggcacacctttatatagttcactaattttttttcagaatacaacaactatgcaaacctggaggagtttaaaatatatttggtttggaaatttaccaagaattcctcactatttcaaaaaaaaatgtcaccaactgtaacatctctcatagtatgagtcaccgatgtaacacagctccattagtgtgcaaatgtagcttcatattcatgcttcttttaggtaaaagcagctgcctacctcactatgtcttctattaccctcatgcctgaacatctgcatattgagatacacagaattttataaaaatatgtttcctcatatttttccttcatattaccattatggaattatagtgattttaaaaataatatatgttatataatctatgttatctatctcatataactggattatctatgaatttcatttttagagtagcaaaactgtacatgaataaatatatatatatatatatatatttttttttttttttttttttgagacggagtctcgctctgtcgcccaggctggagtgcagtggcgggatctcggctcactgcaagctccgcctcccgggttcatgccattctcctgcctcagcctcccaagtagctgggactataggcgcctgccactacgcccagctaattttttgtatttttagtagagacggggtttcaccgttttagccgggatggtctcgatctcctgacctcgtgatccgcccgcctcggcctcccaaagtgctgggattacaggcgtgagccacgaataaatatattttataaaaagaatatactgaatatgagaccctgtcaaaaattctatcttttctcacacatacaaatacaagacaattataaacttaataaacattatttatagaattggaccagataatttaaagaaaagagaattctacaatgtaaaaccctttaatataagctgttttaataattggaaaacagaatgaataatgtttttgtttgtcatgcccaattatttcaacaagtttttattaataacttgctacatggtaggcacagctgtaggtgttggagatatagaggtaaacaagtctgacatgatctatgctaccacggagttcttattttcaaagtggaaggtagaaaataaataaaaatgaactagaagagcaaagtgcctctgatgagcatgcagaagcatgtttcaaaatgtctgtggtgggataaatagatcagcaacacaccaggccatgcaatttggcagcaaatcacttctgcagtctagctgctgttttttctactctgaatcatactccccctttcgtcatctatgccagattccactgagcttcaaccctaccctcccattttacatacgttgccattttaattaattaagtggaaaagttttgacccatcaaccagagctcaagctgctagaagaagtgaatcgtttcttatgcttctttgtgctccattgtgtccccagtaaagtggtgtacacaggaggtaatccataatgatcaatatatatggaggagaaaatactaagagagaggaacactgtcaccctggcaagaaagggcaggtgaatgggagactgaatgggagatttaagaagtagactctgactctcccttaataacttatttccacttcctgatggaattgcacaataggatgagtatagacccattatgaatagcacatccattgaacaaagttgaaattctgatttagccatttattattgtaaccttaggcaaatacctcaatgtctctgagtcacactttcctaacagagaacaatgaaaacctaatgaggttgttacaacataatgcttcagaagcccataacaaattgtctggaatatagtagttaagtcaataagtatagttcattttcagttcactattttaagagttgtgctttcataactggcaacaaatggtataagcattttacgtcatcaggacatatcaaacacatcatacatcatgtgaactccctaaaaattgaaattgaagaaaaaagctacaacaagaaaaagtagtattacagtatttctatgttcaagtgacaattttttttttttttttttgagatgaagtctcgctttgtcacccaggctggagtgccatcgcatgatctcggctcactgcaacatctgccgctgcctcccaggttcaagcgattctcctgcctcggcctcccaatagctgtgattataagtacccgccaccatgcctggctaatttttgtattttagtagagacgaaatttcaccatgttggccagattggtcttgaactcctgacctcaggtgatccacctgcctcggtctcccaaagtgttgagattaaaggcatgagccaccacgcccattctcaactgacaaatatgagtcacaccaattgtcattacatggtatattgtagataggttaaaagtaaaatcaaagggacaaaatatagagaccaattgaataaaaaacttttcatagctgaatcaatactttctaagcattcaaggtaggaactccttagcccccaccctcctaaataaatgcacataaaagcacacaccctttttaatggtactaaaagacctagagtatacattttaatgaagttaatcactacttcctctctctgagtagaaataatacatatcacatataggaattatatatatcaaatctcactccttattttcattatatcttgtttctctcaggatgttttctttcttcaaatgaaagtcaaacagtatgatattacattactgctcaacttcagctttaatacaattattttaaagctattcaaccagttcttttgaagggatggcgttatgtggaccaccttgtataaacttcaattctcaagctctctacatattgctgtcaacattcagttcattgcagagcttaaagagtatacttcactgatgtaaatgctactcacacagagtccaacccagagcgggttcagccatttatggggcagaacagggacatgcaggaattagggcatagacagactcacttgaagggagtaagcaatcaagaaagttccagcagagctgggaaagaaacctgaatgggtagataggtagtccaggcagtatgctggtacgcagtaggcacagttcaaagaaagaagagaagcaggcagggaagctggaggaataaccttggacaaaagaggtttggtcagagggcctggcatgcaaagcttacttccagttctttataaactgtgaatcaaggcagagttggagtttctatgaattaggtactcaacaggagcttcttcacagacgtccttattactaaaaccagaattcactgtcagaactggaatggcaacatgagagacttgatggtatcaccaactgggtcaggatgcaggatggttccaggacctggagagattggtgtacagcatttttgctataggagataaacagatttagccaagaagaccaactcaactggcacttacacatggggtgcagcaggtgaggaagacagctgggaagataaaaaaagggaaagaagcaggtgcagggtgtatttccttcatttctactcatctctctctctctatctctcacacacacacgcacacacaaactcttacataattgtctggttagggaagtaacattttaattcacagctgacatgggtcactattcatacaataaaacatataaagtggaggctgcaaataattatgtaccagagattctgtgagcaggatgaaaaccatagttcacaaaactgttagtaaataaaaaacaggagagggacggctggccctgactgtcaccagctgtgtatagtcacagctcttcagtggagttcaaagagtaattacagaggagtgagttaaattctgtaactgctggttacacagcatttaatgcaatgatccatttagccatcatgctccttctttaagaggaaaattttaaagcaggctttttaaaaagtgacattgaaaatatggcagcttaaaagtaaattttattagtaaaccacatatgaaagctttgaaatgttcccttaagctatgtcaaaggatcataaataagtataactgtcaacagcagaacagtgccatttttatatatgagtagaaagcacagagaggttaggcaactcatttatgccagacagttagataacagcaagttgagattgaaagcaattctcttggatggatacagtgaagctgcctttcttttttacatttcccaagaacatatttagagaaaatgcaacacttcattctcaatcataacttagcacagaaactgccaaatagaaagtgtttgataattactgaggggggaatgattgaatttataaatgaataaattatacagcctctccaacaagttctgtagctacagactggggaggacagtccgttttcccagagtctgccgggcagcagctgggttagcaaaacacatgaaacatgtttgtgagaaaacagcattggaaaactagtgcctggctctaccctaaaaactcagatcctcttgaggtatgattcttttttaaatgtccagttagttcttccagggaagcaaggctaatacggttgtctcccttatccacattttcactttccaaagtggctgttaccagaggtacacaacagtaacatattttgagagagagagatcacattcacataatttttattaaaatatattgttataattggtctgttttataagttattgctgttaacctcttactgtgcctattttataaatgaaattttgttataaatatgtatggatagggaataacatagtacacaggttttagtactatctgcaatttcaagcatccactggggggccttggaacatattcccctcatgtaaggggagtaatcgctatacataatactagctacttactcactaacgtgatgggcttaaaacaaatacactttaaaagtaagatttagctgggtgtggtggctcatgcctgtaatcccaacactttgggaggccaaggtgggcaaactgcttgagccccagagttcaaaaccagcctggccaatgtggcaaaaccctgtctatactaaaaatacaaaaattagctgggtgtggtagtgcatgcctatagtgccagcgactcaggaggctgaggcaggagaatcacttgaactcaggaagcgaaggttgcagtgggcgacagagtgagactatctcaaaaaatatataataataataataataaatttaatttaaaaaataaaaagcaagatttaacatttatagagcttaatcattatttcgtttactggcctaaatgccttacagatgacattcatcctaacaaactcaatgaggaggtaatatggtcagccccagtttacatacacggaagctcaaggatgggaagatcaggtcttttccccagaatgaaggagcagagggagtttgaaaccagagctgacacttttaccacacacaatagtatccattaatatgaagcaataaggatgccatgaaagatggaattgggagtatgtggggttagaataagttagctaaaatgttctctatgcttggaatgtcacggtagtgactaccaaggcttctttgtacaatactcttttctcaagatttgtgcccttgggtaaatccctattccatgattaaaaataaaaattcagtaaaagaacctgttggtcaagatgatgcaagcagacatcaagataaacctggtttcaaattttggcgctgacacttattagctatgtgtccttgagcaagttatttaatctctctcagcttcattttcaggatataaaaggggaatcataataacttacataaattttttatgaggttataaagttctgaaccaggagccattacgccccataaggcatttttggttatcataactgggagtggatattaccggcatttactgagtagaggccaaggatgcagctaaatatcctgcaatgcacacaatagccctacaacaaaaatttacccagcacagaatgccaataaagccagtaagctgacaaatccttaaagaaatacatttgtgatatccctggcataatattagtaatcaataaatgattctgcggctttatcatatgtatgaaatttgtgaagtaatttaggccaaagttttaaatactaaacactaaaggattcttattccttctttaatccagaagagaaaaagtgatttattcttaattacttttgtcatgtttgatttcttgtaaaatattgttttttctgattcttccccacattaaatgaaattataatacatttcaaatgacatttaaaacaattcataagttaagctatcattctggcccagaagtcttggtggcttataaatgatttatagtatccactgagaacagtggagaatattttagaaatgaaaataaaaaacaagggatcattcaagagttagctttttttgtagtggaatcattccacccctctctattgtctaaggaagtaagttgcagcacatctttaagaaaatgctacagatcagaatcctctgtttatttgtcttgcgcaattgtctcagtgcctttctgggccaaagttttgtttcgctttgtttctgaaagcatcagtcctggaaatgggaccattttcctggaatatttggaaagattttaatcagaaagtgtggtcaagggaacgagagattcctatgttcaacagagaagacagctgcaaaataaaactccttgctttggagctcaacattaataagctttctgtgtacccagtagaattctagatacaagtataagcaccagaaactctcaaacgacactggcttttgtaaaataggatctcaaagccttcatttcagctctcaaaagttaacatatatactatttacaaattagtaatttgcattcttcttttacctaggaacatgtctttacaaaactactattggtgaatgcttttgtaataagcttgttttttttaattcatttatggagtatttattgatatttttatagaaagtcaactggtttttgtgaattgatcttgtattttgcaaccatgctgaactaatcagttccactttccttagccttttctgtatgcaagataatgccatttgtaagtagaggtagttgtatttcttcctttctagtctggatacctcttagtttcttttccttacctaagtgccctggctagaatctccaagacaattctgaatggaagcagcaagagtgagcattcttgtcttgtttctgatttaacgggaatgcagtcagcaatcattcagcagctgtgtgatctcagcagctgtgtgaatttcataaattttctttattaagttgaggaactgtccttctatttctagtttgccattacaacgatttgtttccaaacattaaactaacattgcattctacatcctacttaattatgatgtggtatcatttttagattttgtcgtagtgtctttgctaaatttttcttcagaatttttgtgtctacattcatgagatatgatctatagttttttaagttattttgtctaactttgatgtcagtataatttttaaaacagacaataacaagtgtcggtgaaaatgtggaaaaattgctgatttttcttatcatacactgctgataaaaatgtaaatgatgcaacccctttggaaagcagtctggtaggttcttaaaatgttaaatatacagttaccacatgacccagtgattccactgtcatatacatactcaagagaacggaaaatatatgttcacataaaaacttgcttataaatgttcaaagtgttattcataacaggtaaaatatggaaacaacccaaatatccatcaactgatgaatgaatgaataaaatatgctatattcacaaagtcaaatattattcagccataaaaagaaatgaagtactaatacatattacaatattaggacattatgctaagtaaaagaagagagtcccaaaatgccacatcttatatgatttcatttgcatgaaatgtcctgaacaggtaggtctatagagctataagtagatgaatagatgccaggaactggggacagtgaagaatgggaaggactataaatggttgtgggtttctttttggataatgaaaatattctggaattagcatgacagctgcacaatcttcggaatatgctaaaatccactgaattgtacactttaattttatggcatgagaatgatatatcaagttacatgttatgcacacatacacacatatgcacacacatctattgctgatctcagtttcaagaaacatggaaattaaaactagaaataacatttcttgatagctcatgtaaacatgctgttttaacaaatgaaaacttgagatacagagaagttaaatgacttgtccaaaattgcaaagttatttatataaaatttcaaaaaattacttatagtcctggactgcttctataaccattttcttatacacaaaaattctccgatgttgaaatcattaaaacaaaaacaaagtactactttgactcttccactgttctcaaaagaattttttttttcatgtcatgttgctttctcttaagttgtatgaaatgtcctgggactcctcttatctaacagatgaaaaaataaacattaaagatcaggtatttatctccataaaaaggttagcgagaaagagaacaacagatctgcctccataaggcattaattttccatatcagatggagacagaagctcttcaaaggacttaacaactttttcccagctttctttctctcctcatccctccctccctccctcccttcttccctccttccctcctttccttcctttcctacctagcaatgtaacttttcttaagtagtcctctcttcttagggtaaatgtactccgcattttaaatgatttgaaacctaccaaggtctgttttgacctaaataatggaggcttaaaaaagaattattacagaaaataagcactgtggtaaaccccaagctggtgaagttggtgcacaacaagagagacatattatcacctacatggaggaagtatatatgacacccatggaaggaccacacaaatctatgaatttctagaccttgcttcctctcaggatttacctttagcttctcaggcgtgaacttgcagaagctctctgccagaaatgagtgctcagagtattatttacactctgcctctgggcctatatcaggggactgcaagggctcttctaccctgtatgttagcagacaagatgtaaacgtttaaccaaagcaataaaaacaaaaaaaagcaaacatacatcaaaaccaaaattgtgtatttccaagaaaattactattctctactgagttctcacaaattaacttgtaacttcatagtcaaaatatgatataaagctaacataatttaagcaactgtctctgttaatccttacattggtctcattaccaccattttcgggtgagtagtatataagtttttgtaaaaattaggtaacatttggaacaaatgaacacgtgacttttttgcctactctctatttacaaatatgctgatacagagataagactttaaagattatatgtccattgacagagaaataattatttattcccatccactatgatatttgtttctctcgataatcctgtgaattgactcaagcatatatgatagaggcccatttacacataagtacatgataacatgtattcaaattactgggaaatcttgttaaaatgtagattatttttcattaggtatggacctaagattctgcatttctagcaagctctcaggtgatgctgatgcttctaattctcatatcacactgtaagaaataaacacactctaaccactagaaaaaaaagggttatatatgagatggatccatcatttgttttaaataattgtactatactgaccaaggctatagatgttgatctaatcatatggtttattgtcttccacaacaacaacaacaaaaaacccaaccagatgctaggaaaaaaacacggacttttatagacagagtaatggggaatacttaaatctaggaagttaaattgaaaaagaaaggctataatatgattcatttgaattaagctaagctatttggagaaaaatcattgtaatatcatcaatcagatcagatattttaaccaatgattctagtccctccaagagtactctctgcttctggcccaaaatgaccccaaatggcaatccagacacagcatttgtgatgttgaatcagggtcaacaaggagggattttgttaattcctttcctcataatattatcatttgtatatagatacatacaaccatattctccacaaaatgggttagtataccatctgttatcttagaaaatctagacgcttttctattagctattacaactgagaataatttctggactaggcctgctagttaaaaaaaaaagaagaagaaaaatttaaataaaaaactaaaggcaatataagaaatctcaagcatttgcagaataaaattgcattttaccttaaaataacttttgcaccaatgaatgattctgagactgctgctgactattttccaaattaacagaatactctcaccttcatttgtattgagagtttcccatacttgcataaataacaaacggcatgccaatgtattctacatctgtctgttccacaattgagatgttcctgcagttaatattaacaaaaggcgcctctcccttcggtctgtaattctgtcactgttcttcctatctactttccagttaaaattctgattatcttcctgagtatcccttgaggcctcttgtttcttttttagtagttgctaggcaagttctatgagaatgctttaaaacatcagaacaatccaatgataggtatcctcttatagaatgcttcatggaaatttaaacctggcctccacacattacagcttccacattaatggtattctctatatattcacagagccaagtgcttggtttgtttgtttgtttgtttgtttgtttgtttaatttcccaaagtaactatgttcaaggccctgagacccagtctacaagcttatgggatctcattgtcttatgtcagctttcttatgttgatggtgacttaactattagttttgcctctgaagttatgattttgctataaattgcctttagttttttgagttttcatgaatgttgattataaaaacaaattaagcttcaccaagaaatcaagttgaccagttctgtgttcaattaaattttcgctcccaaatgatctcaattttccagaccacaggtgaatgcttcctaagatttcattcattatcagtcaaccagcaagtactgaatatgttccacatgtttagcattaaagaaagcattctgaaaaatacagccaagatcatcagaattgtgcaaaaatggcttagtcctgttgtctagggattaaggaatgtctctctgaagtaggttataggaatagttactttacaacagatttttcccaaggaaaagaaactctatttccttcacattaaaagtacacaagtgttgtcttaattgtacacaaagttgagaaaagcatgtgttgcaagtgaataatttccctttttgttctttaatctgactaggaattgcctcattaatctgcccatttttacttcaccacaacacttaccaggatgctgctgcctattaagattgttctgatgttaaaaaacaaacaacaacaacaaaagaaaaacactgactcagacatggcctttctaaagtgggacagctgtctaccttctctccttcccttttccctccttatttccttccttctttctccctttcactttcctcctttcattccctgaaaacattctatactggtcaaatggacaacgaggaaaactatatgtagcagtttctttaatgtatctttgtatatgccaaagtacttccaccttactatctttcctccaaatgctttatttttaattttccccaattgacaaatttattttgcaagtatataggtttgaactatgtgtttacacacaagtgacacagagaattcttcagcagtcattattcatggagatgttgccagtttacctgaatgaggaagacaccagcattgacatacatgtttaagcaagatacggtgatttttcccttgaatatataaaatagcagagtgactaactgatagtggtgttacctttaagcagattcctctattctgttcatgaagaatgtatatcttcctaaggaaagttgtgtttgaataaatgcctttcttctgtgtattgaataacttagaaagtgcttctttcaatttagcatacacaatgttctgaaaatagccaactcaataaatatttgtttaatgaattatggtatccttgcactaggcatcagtccagtttaatttgagctcaaataatacaaacatatgtcattgtccttctctttatgaaaaatagagcaacatgctaatcagcatttaattttttgcctactatgcagaagaatatgaaatgaaggtattaagatccagttatgctatttagtgtatgttatttcgacaacgattacaaaatctttgtcatctcaactattgatacatttgaaattgtccagtgagtagaaggtttagactatgcaaaggaaaaacctttatgctgttaatcatctcaaactttctgccattctaagtcgcatgtttagagtaaaagtcaagtagtattttattcttggcaatgggaaaactatgaccgttttcaaaatgaattcctatgtgtcaggtgaccactaaagcaataatttagtccccagtgttagttttgttcatatactgtagcatagaaaatctgcattctgtaccttctattccttgaagatggtgaacacgaaaattaaaagatgtaactatttaaaggatgtaactttttcatttaaaagatgtaaacattgcctttccctcaaacgtgtcctattatgaaaatctaacttacagatattcagatgtttaaaataactgtgaccactttgtctccaaaaggattttgcattttgtaaaagaaagcactacaaatttcttttgagaaacacgcttcagtacaattcattacacatgaatttgacaacttttcatttagacccaattttctatagagattatcatgtggcagatattcataaatgctttatttcaggtggaattttaccttgagatacagctccacataaaaacattgttaaataaccaggtattaaatatagtccgattccaacttccattaagtcatttaagaaaacaattcccattgatgcttgtctgagtgctcaatattctttttaaatcaggggagtgaaatatgaaagtaggcaacatactctggaatttttgttgagcctaagtaacttcatttaaagataaaactgaaataataaacatataatttccagttttaaattttaagagccaagaacacattaggtgcacttctcattaaacaaatgagataaggatctatttcagtagcaattaggagaaagaagaaatatgagtgtcgcaaccattctattcttccctcaaatactatgaaacttataacatcacaattgattatatatacacacatatgtatatagatatacgatatattgtgtcatatgtatttacagatgcaatacataactatttgattgcagctatttttatctcaaggagatttcaagctcttggacactaacatttttatctcatggagagacattacaatgctctatgaatggggagtattagctcattaatatttagaaaaataacagattgtcataaagtagatactatcctgttgaccaaatatttgtatctctcctttcaagcatggaggaaaaaaaaattagggggaacattttgcaaaataaccgtttgatttttaaaaaaaataataattttcaaactgatgcttttaatttaataacaaaataatgttattaaaacttaaatacttaacatgtaatttagaataattatctaatggcccagcttacatttacttttacttgaatggtttttaaaagttttgctttttctataatttcatggagctaaaatattttatggatattttgatgccatgcttatatttggctaggtaaaactcacggttttaatgctgacaagaaattagcaggtcctaacaacttttattcacaaatgaatgcattaataatcaaaagaaataaagaaaacattatactattttaaaggaaacgcttaaaattttaagaatgtgattttctagttaaaattgaccctagtgttcattattttttaggctttttacataaacttacaagattttagttttatgtatttatattaaactttttacatgagaccagtaaatagcttactactactttttcatgttatgttgccttctctcaccatagatttttgtcttccaattccttaaagttgcaccttagtagtaaaaagtgtgtacagcattatcagcttttcatattattttactaattgcaataaaaaataaagctcacctatttttaaaatgttatttaattaacctagttattttgaacactttgtatccaatattttttgaaaagtaagacgactttccaaattcatttatctctaaagtacttagtatcttacatggaagataatgacatgtctgtatgatcttcagctgttataaaatgtcaggtgctggaaattcttaacagagctgcccataagtcaattaaatcatggcgccacatcagcttttcccccaatcccaaaagagttaaaaaaaaaaaaaactctaataacatctacaattaatagcattcctgtagcctgtaggtctggcctgttactttagtcttccgctgacaataacggagggccttattatttttccccctgagcatttattaggcatgatgaggaaaaggttacatctctggaaaagagcacaatcttcaactctcttcaggttagatgctttaatgggcattacattagaaaggcattctacactacctattatattacttctcccaattagaaattccattttaatgtgattgccaaaaatttagtgcctgcccatttgataaaattgagagtggcatttgctaaacatcaattaacagaaaatgtgaggcaaatgttgtatgggtagattggctgccagtggggagaaatgaatgggtagtaatggaaattaatggataagggaaatctactttaatttccttgaaaaatgtgctataacagctatctgcattaataaatcaaacttattgtttaaaaagtgaacaacaagatattttgatttaacaagacagcaatccttccaaaatcatagaactcactatcaggtatcattctcttggatatattcaaactgcaggctttgctttggcaaataatctttcactatccttagctctaaataagatcaaactgtcaataaccaggaaataagttgttaaaatgtcattctccaatttatcattttaaataataaaagttgttttaagtaaacacgtttctttccatgtctattttttaaatttctcctccataatatcttccattttaatcccacaataggctgtggccttttgttaatgctacttcagatacataaatttctgataactgaatggagacataaaaagacataaaacacttacatttgaacttaaaagacaatatagatttatatgaattcttttatcattttataactacatttatctaagactcatttaaagtgatttcaatctgtatttgtttcctctaacatttttctttataacaaatttagttaattccatcatctcatctgaattctatgatcacacaaagccacctaaattaaatccatacctgaacagtctgggtaaattccccatataatatttcttatttaaaactttagtattaactaagtcttttaaggaagtatgggcactgattatgttctggaaaactggaagaatatcattaatcattaagagcccaaaatatggaacagggcatgtacatttatagagatgtaatgatttttagcacagaaattatttaccttaaactaagtactaaatgggaagagagggcaaaaggctgtaaatggagaattcttcttccagttttgcaattaacagtgttaatgtcgaataagtaagtagcttttacctctgtgcattttgcacttttacctcctctgggccagaggaggcaacctgcaccatttctaaggtcttttctagaagtttgatgagtctgtgttatttctgttagtttttctgcttatttcacagtaggctaaaattatgaatgaaaatatgtaaaaataaacttagcatggcaattttggcatagcatagagctcatggataatgattacacttctcaataaaacagttaagaatctctctcggggctaactttttattttaggatatgggataatgctaacgaaaggactagattagaaatttatgattaaaataaaataagactaatactgttaataataaatacttctgataggtagactggtgattctggaaagaatgatggcaaaacttttcagaaagtttggtcctacccattctctttgactgtctcctgcacaaaggcttctgtgcctcttcttttcattttggtacatgatccaatcaagagaatatgatccacatctcaaagttttatataatgcttgcaacaattctctactaatatgcctattgatgatactgtatatttgtattcatcttttccatcttctcagatctcctacaccctgtgtactaacttaatatcagccattaataactgagtaaatggaagtgaccaaaatgaactctattttctgaccaccaattccaccagtccacctctatctgtacccatgctctctccatataatgttcttctcccatcagatgtcaaggttaactcttctggtggtaatctggatcctggatccacttcctgtttctgactcaataattttgtttctgaaactaaatcactcttacaaatcacaaattatctcgttactagatcattcacatcagcattcagaaatgctgtattatattttcacatttaataaaagaaaaataaatatcaaattcccctagtgttgccccgtttatttgctcctcttcaaacaaaattttctcaatttcctctttcccattttcctctcaacacataatagttgagttttgtccctattatgtcactaatccttctgtttaaagacaccagtaatctccattttgtcaattccactggtcacttcttcgttccatgtcgactcatatcactcttctgcttagagcttgccgataaatttctatctggtttagaaaaatgtctgaacaccttagtctggcctatttgtctacttctactgaaacttcatcttcttttccaccctcaccttctgcgccaggtaagtcccagtaacactccaagcctcttcacaatttagtgcccttgtacttagcaaattggccagtgaagtgttctccctgaactccacacagctatgcccttcctgcctttcacttctcttgtcctcagagataccttgccggatgacgcaactgaaagtcagacatgctctttatactgtttttattttctgcggagcactaatcattaattaatatattaattcactgattttttcctcaataatatgagacttataagaaatcttacttttcttttgcttcttcatttccagtctagaacactgcctggcacaaagaaggcactcaaaaaatattgcttaattttctcatctttgtatctcaaatgtcattacacatagtaaatgattaataaatgctggttggtattaaatgattataaactctcttgatgaatttacctacactattattttatgatggtaatttatcagtggcttttaataggtattaatatctttcaggaaagatttgtactggaaatagaaagtataaatcaggaagtaggaactatttgatctctcaaaactatttactatttaagcagttgtttcataaatgttaggaaatgtttgggaaataaaaagagttttaaaatcagtacatatatctaaatttaggacaattgaggcaactctttaatctattaattctatgactatatctagatcaaagctttggttttagggcaaagtactgtagaggccaaggagaacctcagaaggtttgctgaaaaaaatcaaattgcaaagttgattaattggagaaaagacaaacacatttatttaatatgtatatatgggagccttcggaatgaagacccaaagataaagaggaaattgtccacttttatgcttatgttcaacaaagtatgtacagcagtgcagaaaaaagggtaagaactaatgctgatatactgagtggggaaacccaggaaggtctatctgtctagactcttcctggcctctttaagcctgcattccttccttctgggtatagaacatgaccccttctggaatgggagttttagtacctacagtcaaacaaggtatatcagataatttctttatgggtcagtttttacacagaaaggtggagagaaaaagtaatatttgtaggtttttatggctggctttggagaaaaagggttctagtttctgtgacctgccttggggaagagggattataggttctatggctagccttaaggagaatggaactgagagaaaagagggcaggaggtcagagaaaaactttagcttctgaggctgctgctgaggccttcatttggtgatattgttttctgaaccccaacagtacccaaaagcccacaaccgtatattttgtattatcaggacattcttcactcaaatcaaagcatctggcatcccacatttcacctagattactttggagttccaaggtacagcaaaacacattaaaaccaattaataaagaagaataaatttatattaaggtgagcagtaagatggaaacaccagaataaccaaacactcaaaggaccttacaaaaaattattcttgattccaactttgaatgttaatcacattttagagaaaaaataattaagatcagttgaaggaaagcaaataatgaaatctttaaagttcactactcttacagattttgaaaaagttaaacagagggtcgttatgtttaaaatacgttgtgggactctattattgaataacagccttttaatctttgcggtttttgctactagatacaacagtgctcttttaatgatctaaatctttccattagtctaaaaagaacaacttgaccacattatccattatctttgtttccagaaatttactcttgaaattctttaaactttgcttttatatctcttatattttcttctaacacaagcaaaaatatttgaaaatcacaatattttttaggacttttttctttatcctgcaagaaaaggtgactttaaaattgttgccctaatcaagatttgtgttgacttaaaagggtctatctacaaacttcaattttatattggcctaacatgtttgaaaatataattttcttttgtttgaagaaagttcctcaaaataggaccaattgtttcatatttcaatattcacctcccaaattagtgcatagtagacagctaataaacatctgcagaattagtaacataaacataatgcttgttagtgtcaagtggctgaaattcgatgattccaatttctgtgtttaaaacaataacaggccgggcgtggtggctcacacctgtaatcccagcactttgggaggccacagtgggcggatcacaaggtcaggagtttgagaccagcctggccaacatggtgaaaccccgtctctactaaaaatacaaaaattagcctggtgtgctggcaggcacttgtaatcccagctactcaggaggctgaggcaggagaatcacttgaacccaggaggaggaggttgcggtgagccgagattgtgtcattgcactccagcctgggtgacaagagcaagactcgatctcaaaaaaattaataaaataaaaaataaataaaataaattttaaaaataaatatttcaggaaatacttaagttttccttgaaaaacactccattcatcctctttatatttttacacaccttcaaattctttttatgacatttacacctttctgatcccacttgtaaacactctgtaaacattacacagtcagtgtttaaaaatttttttcattaaaaattctttctcaacataatacaaacacagatttacgcatttacaggacaattattcctctctcatttacctttaaatagcagtgtccctgcccattgcttactctaccagtttgatataatggatcctttggtggcaactacatgcattttattttcccaaagagaatcttaatatacatcacttccttcacaaagaatttcagtaagagggaagaagagatatcctggagactcaaaatatcattattaattgcaaccagctaaatctctgataatttattttattcacaaaaaaaaaaaattatttgctgtgaaacaaagaattcttattaggaattattaataaggtattatgaacaacctaaacttgaaggttaaatgtgtgtatatttttatatgcccatttggaaaggttcatacttaaaaaaaactctcaatactcatgttgctaaataataaagaggccatgaaattaaataaatacatgttaatattaatgctttatgttggcctgaaacttgctttattgtggctttgatctacttttacccagggctgccaccaatctatatgccactttgtgggaagtggaatatgagtcacctccacatagagacacagtgacttagagcagcgatcccaaacctttttggcaccaggaactggttttgtggaggaaaatccatagactggggaggggggtggtttcaggatgattcaaacacatttattttgcactttatttctattattattacattgtaatatcgaattaaacaactatacaactcaccataatatagaatcagtgggagacttagcttgttttcctgcaactagatggtctcatctaggggtgatgggagacagtgacagatcatcaggtatcagattctcataagaagctcacattgtagatccctcacatgcacaggtcatcacagggtttgcgctcttatgacaatctaatgctgccactgatctgacaggaggtggagctcaggcagtaatgtgagcaatggggagcggctgtaaatacctggttctctgggggttgggaacccctgacttacaggcaagacttgataaactgatcactagcagaaaatcaactgccatctgccttcttagctaaatgcccctgtgcaaggcacaaagtttgtaaattaactcagtggccctgtcctttggatctaggactaagaattcattccacatggcaatctgtactgggtatctttgtcatggtgtcttccgtgtctgttttcctttatcaattaaaaaaataactatgatctcctattcagagatcctttgcacagagttagctatagaatgtattataccaggagcaatgacttaatccaaatgcattgcaactagaggctgacttgaaactttaaagtggccagggatgcaatcatctgtcccaaatgcagaaccattagctaaacaaatcagaccgactctctcaaagacactggcaaacactggtcacagaaaatgctcagagaggtgcagagacatacatgaactattcctgcagaattcttactagggaagccaattgttcaagggctaatgattttctaattacggtatctatatatggttctcatttgtcttaaagatatctcagattaatcctctatttctgcaacaggaaaggaatgcctactaagtacacagtccttcttgctcttaaaaagagttatctgattcgggagtcattctttaagtccaacatttcatctttcttcattaattaattatatgtaacaaaagagttacatatagagtatatgtatatagagtatagaattgacactcaagcgacaaataaaaacaatggtgctatctttggtgatttataggctttaaaaattatcagacatccttggggcaatataagaaaattatatgtattcattcctagtaggtagaaaatttgtgttaaaccaaatctgtatcacagaagttaatttttataattgtagcttcatattttttatttatctcagtcattattagtggatttaaagaataaacatcatggttatagatttctggcttttgtagtgactgattcaattaacattattaattgagccctgcatattaaaaactatggcatgtaatgtgagagtacagaaagaataaaatatgcagtccttgcactcatgagataatacatctgatgtaaaaaaaaatactaaaaatcatgaaattatttgcacattacagagcagcctgagaagtgcgttctactctaagtgatccaagtttcccaaacagagatcaatgagggtgactcgttcaaagctccctaactaaaattaactcaattattcaaactgccattttttctcatgatgtgaatacagttttactatttcaataaaagttatagtgattattgataaagacttttggtacaaaatgccagaccagggatcagaaatgagcttctattccatgttattctcattttggccacaattaacttacatctataggacaaacacccaacagatctttaggcctgaaaggcagaaagaaaccagtacctggggattgtgccttttcaagcttacacagcaggatatgaagaaaagaggtcatgatttgtgctaaagtaactccaaagaataacatatttatcagaatacaaaacacagatatacttgaggaaaggctgacctaaaattgctgaccatcttgtctggtagtggagctttttcttcactctaaacagtcagatttttagtctcatcatagatacccaagatttcctgttctgaacaagtcagctctttatatttgtggcattatcttactaaggccctcaatgtaattcctgggtagcttttatccctatctgttttttttcccatctaaaatctaatcttcataccaatatgaaataaatctagcgtaattgcaatttgagaatgtaaatttcaagctcttaaaaactacagtgcctaataatttgcattgtaactaaatacatgtgctcacatacccacacactcccacgactcataattaaatttcatttaaaatttgttcccttactatataaaatgtacttgtattttccattcccttccattgtatttcatttcatttcattccactccataaatgccaaccatgagccactgaattaattttatgatcctctaaaatagtggttcccaaaatgtggttccagggccccctggaacacccaagactcttccagggaatccacaaggttcttttcataaaactactaagatgtcatttgtctcattcactctcaacatcttgcaaatgtatactagtgttttccagaagctacatgatttgatgatgtcatcactctgagagataatggaaagtattcttgtatattcttttctttaaataattttctcaactttaatttctaatacagtaaatatttataaacataaccatataaacaaaaactctttgggtctctcagtaatatttaagaacttaaagagatcaagagtccaaaaagtttgagaactgctaatctaaagcaagcttccatttgaaaaacagtgacttaaatggaatcattgcatacatacacacatacaagtctctttccatacttttctattctctgcaaggcaaaatgcaaactggcaccaaatgtcttacaacaaattagctgtgattctactatttcctactattctctgctctttactaggaaactccatctaagtcccctaaatatataatgttcacctctgcctttgagtctcattttatagtatactcttgaaatatatttaacactattttctgctaacataagtcctatctaactatgtggacatctgcaatttctttgcttgccctgcgtcctttcttttttggaactgacccttccggattccttgaattcacacgggaatgcgaattatgtggccctaacctttcataggcctgaggattcataccagtcaatcaaactaccccatacctttggtactagtgtgcagattacatgggaagggctaacccaagagcagtcgagggagatatatcaatgttaggggaagaagaaattgtgttttgttctctaagattgctcactgttaggaaggcaaggagaaggccagccttattaagcaatggcttagggacactgtggcacaattctttttacatatatattttttatattttgtcccagtgtccccttgactagacatctgcatatgtctgtcctttggcattgctcccaataatgcctgtgtgccctgtagactccctattttctgatgaggacttgtactgttttcaaatgcctctctattccctttaagacactctattaatttactttgcaatcaattattttatgttattctttttttttttttttcttagaaactcactaggtgcacaaaggaacaattctgtctctgcaactaagtggggattctttcttgtatttcctaaaactctaaaagaactctaatttttaatatatttttggaacctatttgcttgaattttttcccttgaaaatgattgacaaattgaatgctgtgttatcttaacagtttccttacatcttctttaattgctgtgtcatgcacagtttttcttcacttatgttttgaagagaatatgttatccttcccccaccctaaatgttatccctttttgatttgaaaaggcacacaacttaaacacatgaaatgaagataatttccatgctatttaatgtaaatttggaatcttctaaagtaaaaatattaggggaccaagtagttaatgtctatattaataaaggaaaagtgaatacaccacctctgtaatgttagaagacagaagtactcgggaactgtaaccatgtgtacatttcagtaagatgaaaattgagcataccacaaacagaagacagaagtactcgggaactgtaaccctgtgtacatttcagtaagatcaaaattgagcataccaaaaaaatcatcgattaaataacattccaaatgtcctcagcaagtagactttgttatgcatgcttgggattcatattaagatatagccaaaagaattcatgattccgttacctccttcagaaattgaaaacaatgatcatcaaaggtcaaagatgccttcttatgctaaattttattatcaacaggtcatttgaaattttgaaggcatagcttaatgttcttagaattagcacttcttaattaaccaaacagcataacagaattatagagagggagaaaaaccctcagttaaaatgacataaatagtaatttgtgaagttcaatacctcttggtctgctaattattatatgatgcttcattaccatttaaaataccacatataaaaagaaaaggaaagagaaagaaaatttagagcacattcattatataattttgatttattttacaaatgcaattataatcatatttgggggtcagagataataattttgctcaatatttcataaggaaagaaaatctaatttttcatatgtagtcacattttaatatgagcatattttatatgtgatacataatattatatacataattttacatatgactggcagaatttctgcattatatatactttttatgaatcacttaagttggtttttaaaaacacaactacatataccaagaccacatatgcctcagtaagaagaagtatgaaattatttaaactctcattcaggaaacactacaagtttaaatgaagtaacagaaagttactgcagaataatctctctattcaacaaaaatattacacagtttgaaagtaatgtaagtgggtccaccacattaaacacactcctaccctctactgacctattttctagactctaagtcagagtatggaatttatctaagttacttcaatcctcttatctttctaaaaaccaaaggcagtatgcatttataatgcttccttaactcacatcacttcataaatctgttttcttaaaaaaagtcatatcataaatgagcatgcaaagcacatactgcctcattcaaaaaatgtttaatcattagaaatagggcattgcatctattatcatttttaaagtgttaatgtgatagcaatctgaaacaacaaataaaacatctaagaaaggaaagctatacaccttttcttcttaggattattctcagtattgcagcatgttgatggctttactaaacttaccaggctattttctcacctaaaagttggacatcagtgggcaaaatattgccctactgatactacagtgatctatacattttaaatattctttaactgttccaaaatatatatattcattttaaacaaaataggaaaaagaaacagatatgaaaaagacattacctgtaagtccactgcccagaggaaaatgccattaaaacttattcttatacatattcttccagagaccatactctgaatatggatattatacatatatatatatatatatatatatatatatatataaaatatatatattatagatagatttgtttttaaatggaattataattttccatagtaagctttattcaattcttaataacaacaaatatattttcaggtcaacaatatgtatttgtataatctgcatcaatgttgttaatggctgcacaatatattttcaattaccataccataattcagttaaaaatctcttaccagatatctaatccctttccttccaacttctgatactgtaaacaaaatgttggaataaatatccgattactataatgtgtgcatctttcttagtgttttgcatacaatgcttggctaatgcagggtatcaatgaaagtttgttgcattaatgattggatggatgaataaagtaacaaatgtgggtttttaaaatatcatttaaaggagcacgtctatttgatattcagattttgagtcaaatcacttcacacttctttgtgcttttccccatgaattatgataacgagaaaacatgcataatgattaaatgactttcatccccggatgcttccttaatatgtgtgaacttgtaggactataagtaatgctctgtgtgagataacatactcaacaaatgttctaatagagaagaaaaaacgtaattgttgtttttaaatgtagtataaacttcataggatgctgtaattttccatttatttttcttgcataaaatacatagaattacataggaaaaataatttcagcataactcatatgtcccaactctcctctaggattttctaaatttgatttaacaagcagctaatgagcatttatgtctgacattaagctaatcacaatagagaatatttaaaaccttgatatagctaaaacacataacttacatggtcatcgtatgtaatttaattacagaaagtaagcgatttcctctgtgatatgagaaaagactaagattctccagctaagataaacagatgcaatatttacatcagctggaaggaagagagaacttcctcacccatggacaatgtgacagcaattccatccctattctcagcacagtatcctccttgtttaacaaataccttggaaacttgccagttttcaggtatttccatcttgggatactagccagttattcaggacatgaaaccaggacaagaagccagatgtgcaacatataagagtaataattattttccttttgattcccttatcatgacaatggaggatataacctatattttcaattataaattatttcatagactgacagaatttataaaagttcacctgaatttttaaaaatgatatgcctactatgcacaaaatcacataccagaccatgcagggcttgctctgtgtctcagttaaatctggcaacgaaccttggtcaacctgtaaaaccccatggattctcactgaacacactgtactttctcagaagaaaaggattctacgtatgccatcagaggctactcagtaagcaaccaacaccattcaatatattcatttatatttccctaagtttcttcactgtcaacctttaatatctattttcctgaaagagagctgaagcacacataatggtttcaaacatctgtttgttctaattttaacaaaagttgtcccatgattagaagccaactatttggagtaatatcacgtttgttctctataaataatataattaaattgctacaactaacaggaaaaataggaggtagccaacaatataaataaaccacaaaccgtgtttaacctagatttgcatatcgttctcttagttttgctatggttggaatggttttactagagttaaatttctttaaatcaggagatgtctgattaaaattttgaaatgttgctttctaaattctgctttttcttagctcactgcaacctccacctcctgggttcaagcaattctctgcctcaaactcttgagttgctgagactacaggtgcaccccactacatgtgcctgaagaaagtaatggcaaaaaccgcaattacttttgaggtaattaatatattaatagtttctacttttgttgtatatattaataatgagctgttcattcaaaagtttttacctaaaaaacagtttgctaaaagaaaagccattgcattacaatattttgacagcttttggcttagaaattagaaaataaaataaccaccaactaatataatctttagaacatttttctttgcttttcatcttttgaataagtgacaaatattaattaggaatagtagtgatagtttatgaaggtaataaccactactgtaacatgttaataatttaattaagctagtttctattatgaagcaaatttagaaaaggggagtaaataaatgtacacaataatgcattttatctcttcaatcaaaaaatccatagatgctaatgtaatttgttaaaatgccacaacgctattgaaaaccaaagttgccatatgataaagtgatatttattaaacctatcattccagagagttttcctgccttttgttataaatgtatttaactgaggccatattttcttcacatttgttccctaggtttgcttccagaaagattatctatggtagaataatctttataataaatctcaatataccctgctgtgccctaacactttaacactttagggcaacaaattgccctaaacacttgttagttcttctaggcacagagagctactatggcattaaaatagatgtatgcagcaccacattacattttaaaaagtaattacagatatctcttctgtgatcacctataatgtaaggtccaagcccttctgttgaggcaggaactatcagaaagataaaaattgattctgaaataaaatgcttatttcccaatattataagaaacataactgtctcggcgtagtggctcacatccgtaatcccagcacttagggaggctgaggtgggtggatcacttgaggccaagagtttgagaccagcctggccaacatggtgaaaccccttctctacaaaaaataacaaaaattagccaggtgtggtgacaggcacctgtaatcctggctactcaggaggctgaggcaggagagttacttgaacgcaggaggcagaggttgcagtcagccaagatcgcaccactgcagtccagcctgggtgacagatagaaactctatctcaaaaaaaaaaaaaaaaaaaaaaaaaagaatgaaaagaaacatagaaacatacccaacttattcattgtggaagattgtctcttcagccatttgtattacgtattaattttttttatattatggtttctacttttgtcatacatctattaatgatgagctgtttattcaaaagtttttaaccaaaagaacagtctgctaaaagaaaatcctttccattacgatatctttgacagcttttggctcagaaattagaaaatgaaatgataaccaccaacaaagggattctgcagctgagtatggatttcctcccagtgacaggcatttttgtaagcacagagcctaataattgtttgaataaacaatgtgtgtgtgtgtgtgtgtgtgtatgtgtgtgtgtgtgtgtgtggtgtgtaatctacacagaaaattgaaaaaaaattttcacaatggttaatggtattaataggaataaatccagatatcttaaaaagagagacagagagagagatagagaaagaggagctctgaaaataattcattaagactctttttatcctgaaatccaaaagaacatctgagcttccatcattcatcttaatagtttatagagtcaactctaatttcaccatggatgaaagaataaacttgaaataacaaataggcaaaaagctatggagaaaaagcttacagatttatcttaaaatttagcctgacaatttccaccttgacagttcggtcatgtttcctaaaaatgattagctaaaaacattactttatagtgattcaattgtaagactttctgaagaacaaatcaagactatttagtaccagatataaattattttaggcaactcttttactcttagttttattaatgaaaggactctcttaaagaatcaagtcaggcattgacactattttgttttttaacttcatcagtagttaatttggacttcacagcagaatgtacactgaatacatgctctgaacgtggcctaagggacaacactaacctgacatcaaaaaggcctgttcatattactaacattaacacagcatattacatatagaaggtgattcgtagatagggagtaatgaacaatgattaaagtttacatgaacttcatctttcagatacaactagaagcatttttaacccaaagttatcaataaggcaccatttggcatagcacctaagtttttccttttatacttcaccttaaaaagcttgctgttgactacaaagatgttgaaaatataaaaatataaaaataataagaaatgtctcaatagtttgcatgtctagttgatcattttaatgtgcacctaatactaattttaaccatacacttaataaaatgatccaaactcataaatgtattattccctttccattccaataactctgtttttaaatagtttgcaaacacctaactgacaaattcctgaagctgcctgagagtcatgaaccacttgtaccccttcccaatttattcacttatttattcatttattcattatttctacttaaaaataaaaaatgtgttggtcaaggagttttatatatatatagttctattaattcaccaaattactaaagccatctttaccaatcaaaagttactctaaatttgttacattagaagttcacatttccaaatcacagaagatttactaattattagtctagatatagtataaatattttggcttccactttttgccatttatttaaatctaattaaatgctcttaattgtatatctctaagtttacctctcaaatcagagaggatggaaagatactctttgcatttaggggtatgaggaatccttatcactttctcctcgatagaaaaatcaatttatttccttttctaaggccactgcgagatgcttttccagctccaggctcaaagagagagtgtttcatccctatttcaatggacaccagaatcaatattttctttaggtacttgctaaaaagtagttacattaagtccccacccagtggtactggccttagtcttttcttactataaaagaacatggctattcctgtttcttcctatactagggatctcttcaaacacaggacagttaacaaattgtcagtaactattggtaaacacatccttccagggaaaggcttcacatttatttgcctacatacacatattagggaacttttcttatttagatataatagtgaaaatgtttgtaaaaggcaaacgtaaaaaaagaaaaaacataaaataaaaatctgttcattttaatgaaatgcattatgtcccctaatctgccaggatggatcttgtctatgtaaacaaatttcatagtgactttcaccttcttcaagatacttactaggaagtatcttaaaggcaatgaatataactcttctacataaaattctgtacatagtagagtggatagacattagctactaacaaatatttgctggcaaaaagctagagcaaacattcaaagcatttttttatttttattttttaattaatctattttttttgagacagagtcttactctattgcccaggctggaaggcagtagcatgatctcgactcactgcaacctccacctcctgggttcaagcaatcctccctcctcagcctcccaagtagctatgactacaggtgctcactgccacgccaggctaattttttttttttttttttttttttttttttagtagagatggggtttcaccatgttggctaggctggtctcaaactcctgacctcaggtgatccacccacgtcggcctcccaaagtgttgggattacaggcatgagccaccagagtgttctctgtattaggctgcccagtcctgtttttgtatgactctctatctaagaattagaaaaaggtttctctttttaataaataaaacaaaaagaagaatatataacgaagagtgtatgcggccagcaaagcctaaaatatttatgtggtccattaccgaaaaagtttgccaatctccattttacagtacagaccctttgcctaatatatgtgcctactatatacagggtattagatttccagagaagggaactaaaaaaagaaataattttgacttttcttcctgagtcctataggctgaaggctatatctgggatagaaagggattaatatttccaaaatacttaaaatgtgttttcctcttcatcaaatctgaatcaaacagtctgtattaaaagtgaaaagtatattgccctgtatctttaatatggataagggcaccagagttgtgcccttttttagccaaaatgtagttatgaagaaagaggcttctttaatagatgttaacaaatcaagtcagtgacaaagggaatgtgaatagagaaaccgcttaaagagtaattagtttgtatttaccccaaattttatttagatctaaaaaaaattatctctgcaaatactttatagatctagaactcttttagttacataacactgtcagttaaatttcaccaaatagttactgggagattggaccaaaattgcagattcaacatttgttagttttcctttctgctctaattccatgaaaagacagaatatatactttttaagatccagaagagtgctagaaaacaaatgacagattttgagggctatcttaaaaatataaaacatacaggaaaaaaaatgtgtgaagtaaatctgtagattaccacagactaaaattcacatggacaaaaatgctgtaggtttggtagtataatagtaaatatcaccaacatccatgataggtattctcaaacaaggttaagcaaaaaactaatgattactatacatttaaaaaggatcaccactttaaaagagctatgccaatttccactaaaagaaaaattttcactgagaacttactgagaaatgggaataaaaattacctatattagaagaaaaaccataacggaatcagacttatcttcaacgtcggttaatagaagagtatggagagatggcttcaagcagaaaattctgaatctagaatgttttactcaagcaatccaacatcaagtagaatgaaaaatacaatgttttaagatctacaagaactcagaaatattaatatcaatgaaaccactctgaaagaattaactgaaatgtactacaataataaggaaaaaaggatccaaggaagaagataatggagaatgagaaatagtcaaataaaaagataaacataaacaaatcaaaaatgttaattgaaaatacaggagaattgagatatgggaggctgtgctaagcaagaaatacagttcaaaggcatgaaggaaaagactgatacatttacccatataaaaaaatgaaatgaaaacaaaacttcaaaatgaggaaagataaaaatgtttaaaaagactatataatggctgataaacatatttgtcccatatatgacttacaaaatgtcaatagctagattatataaaaagattctacaactctcaaagaaaaaatgagcagggatataaacagaaaaacactacagagaaattacagagaaaatgaacaaaagtgaccaataaatatatttaatgacttcccatctccccagtaactctgtattaatagagttaataaagattaatatagattaatataattaaagttaacttaacatacagttaactttcatttccataatggaaattaaaacagcaacataattctctctccatgagactggggcaagcaaaacatagtaatattaagtcgtggtgaggagaattaaaacagaagctttatatactggtaatgcaaatataaattaggagagactcttgtaacgtaaattggcagtagtttgctcttgggaatttcatttttataaataaaaaatattcgtagatgaataaatgtatccatgtgtgagttaaatatggacaaacatatacagaatatccactgcaacattattttttatagtaaaaaacattgaaacaacctaaatatttaccaacaaggaatcagtaaatacatcatcttctatgccagaaaatactgcgcagatttttttttgaaaacactgaatatttcatgtgttgttacattgtgaatactaaacattaacatagtgagaaaaatatctaataaattttaaaaagtttttcatttatattttccatttctccttccactcatatatcgattttgcccttatgcaaactacatatctgtaaaaatatctaggtcttttttaaactttttattagcatataagcttttttataaatataattgccaaatattcatattttttttccaaaaaatcgagatagtgctatcaaatatccaaaacataggaatggaaaaaagcaactcacagaaaaaatgcttattagataattctatttgtttaaaataaacacaattgacatagatatatatgtatatatgcgtaaatgtacagaaagtaaaattgaaaaacagcaccctgaaatcttaatagtgctttactttgtagaggataatgagaaagcagtaggaatggaggactcttttccatttcacaatacatttctatatgctattcatcttttacaataaaaatgcacttatgtgacttctacaactaaaggcattcagttatacaaattaaacaagaggagaaaacttttaaaaaacaaaaactcatttttttcactgtcagtcttaacattcattttatttgtcataatttgaggttttaatagttcttcatatgttgactacttattagtaaataaacaacttactatccaattttaaagattttctatttaagttagtacaataattcaatataaaataaaaaagtattaacaataaaataaagattgcaccccacaaatctggatgatgttgaagccatggtcctcattttcttcttctagatattcactctgctattacatagagtcaggccagattaacatatgatttgggaaatgtatgctctttttcccacattctggaattggaatttgtggtgacatattttgaacaattaatgctcctagaagatcctgttacaaacttagaacaaaataataaatgggttattacatctgtgtgtgtctaaagtttatttaggaaatcagaatcttaccaagaaaaaggcctcaaatcagcgcttcatgaccactaaagtataacaacctcccactctacattcactttgtatgaatacacttaaggcagcttctaataaaggatgcatatgttctgtgttattttggaacatatactgtctgttaggttgaaagagcttgtccatgaatcaataataacttggaatctggacatctctttggagattaatggatagctaagtagagctattcacaccagagaccactaacccccattggtccctgtccagtttgtagcagctgcagaaaaggaacactacgaaacacagaattacttttttggacgttattccaatgatcctcagcaagtgtcttttgcaaaaaatcaaaatggattaattttttaggccaggttcactatattctattcaattcagaaaatccataagtctaaatccggatagctgctattgaaatgttcatacactactcaggtctattcagggaactgggatagttctgatgcaacagtgctttaataagatacagattcttccataagggtcagtgataactccaatgttcagctgacaaaaataagtcaggcctaatttaccacatgagtcttgtcggcgctccttagagtttatcctgccaaatcaatgactattcctgtggcataaaccagatcattttctttttaaggtcttagtcattatttattaactcatctagtaaagtactcaccttgaaataatatagactttagatgcaaaccatttacatttattttttccccaaaaagggacttgtgatgaagtgaacagtatggcttcatggcttttactactatgacaaactagacagttttgtttggacaaataagaatgccaattttgtttggaaaatcaaacgagaatgctgtctaaaggttctaaccaaggagacaatccatccgtaaatgactgtcaaggtgagctagccctagaccaaacaaggaagaggttaacagctctaaatcccctctcctgtttaaattcttattacccttagggtatctaaatcaatgcaaccatgtgttgtactgagatataattccttgagataactgagataaaacaaccgagataactcattgatatagcagagtatttaccctaatgctccatgcagagaacacaggcgttagcagctgctgtacctaagcttcaaatggtttttccccagtttattagctgtatgagggtgcctaaattatgcaccctgcctaaaacttcagttttcctttatgcaaaataggaataacaacagtatctactctactaggtggttggggagatcaagtgagatcacggactcctgcctttacctctgctttatgacaacttctctccttgtctttcaatttatttattttctgcctttcccactttttccccccatattttcccctatttttcttttttaaaaaaaatccaggaacttgcgtcctgagagatatttttcttcttttgctttgattcactgtttttagatattctaaattggcaaatttatcccaattggagggataatcagtgagaaataaacaacatagtaacagaatattttgaaatttatgaaggttttgttttaatgtctccaagaatttactaatgacagtaaaataagcagattttgttcttatataagaatgaaatacatgtgttcatctcattactatgactacattcaatatttgagtgagaatacaattgttaaagttatttatgagatataatttacatacagcaaaaaattacccttataagtgggtaattatatgaatcttgacaaacacttacagtcagataaccaccaatacaatcaaggtataaataatttccaactctgttcacccttgcccctacaacccaggcatttagcaatcagcaattgttttctgtccctgtagttttgtgttttccagaataccataataatagaatgatatagcatgtagacttctgagttggtttcttgcccttagtgaaaaccatatgagattcagccatgttgttgcctgtattcgtattttgttcttcttactgttgaatacataaattgcatggatgtaccccagtctgtctatccactaagcaattgatgggaatttgggtggtttctaaaatttatcaattataaataaaaccactctaaacgttaggtacaggttttgatttctggtatggatgtagagaaaaggacttacgttttcacttgtctttgctaatatgtaggagtagcattgcttggtagtatgttagactttatcagaacctgtcaaatggtttaatggttttcccaaaacaactttatcatttctcattcacaccagcaatgcatgagatttttagttgcttgctctacatacttgccagtacttgatattgtcatttttttaaaaaattagccattctaataaaggtgttgtggtagctcattgtgactttaatttatgtttactaatgactaatgatgttgagcatcttttgccttccatatatcttctgtagggaactgtctgctaaaatattttgatcttttttacattgtgttcattaacttatcattgaattgtaagggtgtttgtgtatttaggataggcatgtattattcaatatcaatttgcaaacattttcttctatctcttgagttttccttttatttctcaaatgcacctttgaagcccagtgctaaaaaaatcaatttttaagaaggtaaaaacttacttaaattactacttcacattatttttccctttataaatgtcaatgaaatattatggtcatatgtttttcaaagcttttagctcattacacttttcttatctactttccaaaagagaagactatgcatagttaacagttcaagcgctcttttgaatttctttgccacatagcttattctctagggaagaaacacttacataaacatgttgctctgaagagtacagaggggaaccttagtgacacagtttttggttctgtcatcaggtgtagacatagactttagtttctcttctctcttctctccattcttaatacttttccagtttgggtttgggcctacattcatcctcgagtcctattaaacaggagtatgatttttgttctcccaactcaacaagacaacgtcttgctgagtttccttttctcccaggagctgtttcccagatccatggctcacatgctggccaaggagctgaagtgtcgtagtgctgcactaaaaaagctttcccaggtggagacctcgccatttctcaaatcttagccttcctctctgggataagtaacaacagacagagcaaagaataaaaggaaaacaagcactttgggagcatccaatagacctgggcctatgttctggatctgacattattcatttgtttatttactctttctttaatgtattcattcattcattcagcaaataactctttcagcatctgctctgtgtgccatgctaggaactaggaatacagtagtaaatgagacagacttagctttttccctcaaataaatggcaggtctgtcatttctttgttgtcctgaataagctgttaagcttttttgtgtttcctttgtctattctgaaatggagaaagcagttcttagctcacacatctaatgaatattataataagacaaaccaaaatatccacattttaaaaaataaggtggatgtgatgttctttgtggtcttccatacccccaattttctgcaaaggtgacctcctaaataaattatacctaaggtggaaaagaaagatccaactgcagtagtacctcatcaaaatggatgcttgtgatgatggagagctggttttagcaagaagcccaagccagccagctttctagtatataatcctgataatctactcaactatggtcctactgcaatagcttctgaataaatgctcaacagttcaggttgcctttccatatattttcactcctatactagtgctttgactagtctctatagttgtcattcacccatctatcctcattgtaagcacactttgcatttgtcaatgaggcctttgcacttgaaggagaaaaacatggaaaatagaaccagaaaatagtctgacatcatgtactaaatttccagaaaacagattatctaatatcttgggaacgcgattcaaggagcacgttcttctgagataaaaaacagcttttacaatacaagctattaaaaggcaacgatgcaatacaagctttttattgttaactccattctcataacttcagtttcaataaaagatcccattagaaatgcttccccatgtggcaactgctctggaatttccgccattattttctaagcattttatctatttatatcataaagctataaaagaaaggtctggatcaacagtgtgtacatatgaatcttttcgtctaaaagcctaagactcaatccgagaggggataatataaaactttagaagccacccagtttctgtccaatctgccatgaaataaattcagagacagaaagagagagagaagaataaacctggctgttttctattcataaaggtctcctccaaaagctagtcagttctaactagctaacagaactagcaataatgagtttatttagtataaattttgcatgtgttctcttttattccttaactagtaaagtagatatgagcattacccacattttatagaagacaaactgaggattatagaagttaaataaccttgtccaaggtcatacaggtagcaaacagcagaaaatatttgaatgtaaatattctaccctcaaaccttttattaaattatgcaagatagaactttgaaaggctaacaccctcatcattagcacacagtaggcatataatagaaattatcagctggtagatcagtgaatttgagggctccaaaataggtttagtgcttataaaaagcacagttctttgtagacagaacactacctattatgacaataagctgttggcaggacctgaaagaaatcagggagggccttttgaggattaagaaggtataatgaaaatcaggaagctggtttaatgagaaagaaatgcaatatactttgcctctccgattccttttgtatttggtgtactcatctaggagcaactccgtttgttttcttactgtcactctttttttcacatggcctggaaacgattcatgtttctttagtgatgcatggggagagaatagtttatgcagacaattataaaaaggatggattattggtagagactgatgggtcaatataacatatggtgttcaatgcaactacatatctttggaagttactgacaagtctataggtacagcaatataaagcagattttaccaagtgcataaatttgcagaatgactatattttttaatcaccaaaagctatggactaagccatctctagtgacttgtgaaataacgtatgcaagaaatctaaatacaaggacatacaaagagtagaataatcacaaatatatcaacagggaattatttgaagcatacatgtattaggagtaagttctattacacgagagaaaggtaaatgattgttataggagaaaacaattatatattgtctatgagagaaggtagtcattcaatatttatattggaagatatcattaatagacgataatctaagtctttcattttacaaaatgagaatggagaccgaaataatttatactgtatgcacatttatatagttagcctagggctagtctcagtgtgccatactgccccaaagatttttcgtgaactgaaaattatagtacttttttatttatcttctgttttaggttccctttgattctcagatatttttcttttatgtttctattaactcagccattcaccctttcccttctttagtcactgcctgacacttggttgcaatctacctttatacaattaattagggtgtaattctccaacttgctatgattctttttaattctcagactatcatccaaattctttgtcagccccactttaaaagttgcgaggacaccaacagctcatgctaaaatatttttcatttctggtaaaatgccatgtaagtggaatgctaataaaattttagattccgtataataaatataatccatatagcaggccatgttgctatccacagaaagcttctccacacactatttacataggattcttcactacaaaaatcacatggagaacatcctttccctattctttatctaagctattccttggtaagaggaaaggttgatgattatgctgaaaaggggaacccagagcactttgcaaatttatgttctttaaccggcatgtattttaaccttcaactactttctattttcctacattgactattctaattcatctttccagaacactcacttccattcccaaaatacacaccgacaaaacctaagattttagattttgtttaccatgttctctgtgccagacatggttctaaatcttccatatttatcattcaccacattctttcaagatagggattgtcattgtctctattcacagatgagaatactgagccttagagaagttaaataatccaatcagtcttatagagttgatcccaggtggtgtgatcttagagtctgtacaattaagtactaagtttcattaataaacaatctcacacacacacactctctctctctctaaatttaataacctccatcaaggctacatttccattatatctcaccttgcatttttcaaggaatacacttattaaaagaaaaaatacagacttaaatagggagataacttatcctcaagttttccaattatacttaatcacctagtcaaaagcattcagctttgcataagtccctatattatcacgacttttgttttgacaagagaagaacatagccagagaggcagaacagaatgtacatgccaaggatctaggtttatatctagtctaaagaaaacctcatcataatcagagaattgatttttaaacttcctcttccataaggagaatttctaatttaaatgcagttcactaccagagaatgcattagttctgtgtaatgcatccagaaaatgttcaataaatattaacagataattactaaagttatagataatataaattacacatgtagtacacacatctgagttttttaaaaagcataaattcaaaataggattttaaattatatacaagaacaacaactgcaaaattaacttcctgaaaggtacagcaagcacaggatacaaaataacctgaaccttacttagtaaacacatacaaacggtgatgcaattacactgtttttttaaaaaaaactattttcttcacaattcattctcaatatgattttcagttttaaatactaaaatcactgacgcttaaagtgtctgttctcagtttaagagaaatatagggtaataacattgaatataaaagatcattttagaaaagaaatacatattaatgtatttacactgaggcctaaattatcaaccaatatgttgcttattattaatttcagagagaactgcattgctttaggggctgagaaggggcctaaactgagacataatgaactgccaagctgaaaaggatgttagaggtcattaagttacgccttatagttttccagatgaggacactgagacacagagagtagttgggacaacccgaggtcaaaccacaaattagtggcagagaaaagacaggaactcagaggaccaaacgcagtggctcacacctgtaatcccagcactttgtgaggccgaggtgggtggatcacctaggtcaggagtttgagaccagcctgtccaacaggacaaaacaatacaaatatatctacacaacaaatacaaaaattatcctggtgtggcagtgcacacctgtagtcccaactactgtggagcctgaggcaggaaaatcgcatgaacctgggaggcagaggttgcagtgagccaagagtgtgccactgtactccagcctgggtgacagagctagactctgtcaaaaaaaaaaaaaaaaaaaagagctcagaggatcctagacctcagggtactgtatttgaagatgggacaatcttggaaggtgtcagtgaactttaaataaatagcaccccatctagtagtttctctttcagtcatggataaatgcaactggagacaagtcttggctttacgccgagcaaggcagctcagagattcacagcaataattcttgtgtgactaagcaaaggcctccactgctttaaatccctgcatgctttaatctccagctgtctttctggtgtactctctcagggtagggagggatcttaaagataataacttttagctttgtaaaaagttcagatgattttaatggctaagtatttacataggttatcattttcaaagtccaaatgttggtcaatgaggatattatggaggggaaaagtcttgcctacgtggaatatctatgactttgataatgaagagtgagcaggttctgcaaggagatatgttggaaaatactgagctcccatgactaaaattaagacaggaaataaatcaatctcagaatttctcaaaagatgttaaatgggcagtttgctggttttgggaagtgagaagggaggtggtaattattttaatccgtatttttgtggcacaatgccacaaaggtgtacgtatcatgcttaaagtatattcgcttgaatgagattatcatctcatatctgcttccaggaatagctcagatagaaactggtgctggggttaaggtaagaaatgatgggtttaccttcccttgtcaaacaagctttatcatttagagtaagcacaaggccagtttaaaccagcttaacttttacatgtatgtatgtatttatattttcatagaactacatatttatttctcacatatttaattagtgtcaaagacagcagtgataatagaaaggagccctggaatgaaacccagaaatcttgagttgacatcccagatctgcatgtacctggcttctgcccttcaccaagtcaataccttcaggattctagagctacaagacgaaaagcttagacttccaccagggaaacctccatattacataaatgggggagataagtaggttagacttattcaaatgcagaaaactagaaaattggctgagctaggactcagtcaacagccactctaacctccttctatatcatcttctactattgtagaagatggaaagttaaaaaccatctttcaccaattccctttacattaggattcttcacatggcgtaggtttcatcaaactcgtgaggggggagtaatcattccacagcccacatgagtgggctcacacagtggtggaatccctctttgttattgtttgacgccataggtttcacgtaaggagaaatatgagtcaatgacaatttttacttttttttcaatggatcctggagtttaaaaaactgcaagaaggcactggaattaaatgattaagtttgggtccaggcacagtggctcatgcctgtgatccaagcactttgggaggctgagctggaggctaccagtgtgtaatcaatccacattatatttaaggaagtgtgtttattatgtcttggccttcagaagtattgctccacttgagcccaggagtttgagaccagcctgggcaacacggcaaaaccccatctctacaaaaaatagaaaaattagccaagtgcagtggtatgcacctgtagtcccagctgccattgcactccagcctgggcaacagagtaagaccatatttgaaaacaaacaaacaaacaaaaaaagatactctgcatagaaattaatcacaatttctttaaatatgcaggtttttaaaattttttgattaaaattttccaaaggaaatagctccaacttttaaatatttgaaggggaaaacattttattttatttattttatagacaggctctcactctgtgccctaggctggagtgcagtggcatgatcatacagcatggtaatctgaaattcctgggctcaagccatcctcctgcctcagcttcctgagtagctatgactacaggtgcacactaccacacccaggtaattaaaaaaaaaaattatctggagacggtttttgctatgttgcccagctggtctggaactctgggccttaagcaatcctcccgcctccacttcccaaaatgctgggattacaagagtgagccatcacatcagccacattttcatttagacaatttaatttggaacaattggagcaatgcttctgaaggccaacacataataaacactcttccttaaatataatgtggattgatgatacactggtaggtatttatattttgaagtgccatgatgagttccgaatgtttagataagaaataaaaagggaggactagaggaagtgtaccctccagagaagccaaatttagtctgggaaatagaaatagggtcaatgtcaacagcagcaagatgacgacagaccaatggctgtttacaccagagtctttccaggttttctgacaagttttgtgttacttcatatcttccttatttaatcctggccattaactacaatacagtactaacattttaactcagctatacaaacccaaaacttcaataagtttatcagagacaatactgatatgttaaaaaaattactcacaaaacacatgcatacagaatatagtaatatcacatattttgcaactgtgtccacaattaagacctcctgtactaagtagaatgtcactgcatatagggtattgaaatacagaagccatttcttgtgtagcacccaaggaaagtctttcacattcaaactgccttttacattaatggaagtgccaaaatgatttgcatttgtatattcgcaaatcatattgttttaatatttcaaagaacggatcacactcaccccttatcctatttgattctattaggtcttcaaaaaggaactttgggtggacacaacatacagaaatcctattaagcatatgatttcatgaaggtatgcatgtagagtgtttagaatatgacacatatttaaatgctccattaaaaaactattaatgttaggattagaatataaatctacagtaaaatggtattgatgacagaaacattttaatcttttgtcagtcaattattgatatttcaaagtattttataaattttggtacaacacatacacccaccacaataatgtgaatcctttcaaattcttgttttgcacatatagtacagtataaacttgataaatgttttttaaaattaatatagaaatggatgaatgagattcaattagcccaatgtcagatacagttgttgaaatacattaagtattcaacaagtggatacaaaaatatgtttgaactgccaattatagcaaggtctctgtgtcaaattaaaactaaaactaagatacttcgtatcttgttaaagactggcttaatttttgtcacatggtatacttccaagtgcttttacctgaagaagactaagcatttctccagcatgcctgtccataactagtatttatcctctatgcaatttgttaacatggtacctaagagttgacaaagaaaagcagatacctctttagctagataattcattaatccatgttattttatcattttgtggcccactgtagtgactctcacttatccatttatttgttcaataaatatttcctaagttcctattatgcactgtacaaggtggatactccacagtatgcttaacaggtatggcccctcctttctccaagcttagtttagaaaggcaaataatcaggaatgaaggtgtttatatggggctgaaagattagggaggagtaaaagggaaaaggagcaacacttcttgcacatcttctatgtgacaagcacaattccaggtactcccccatagttcctcttttcagggaattgttgctgacatgtgatgtctcccccaggcacccagctttaaaatttctctcttttgtactctgtccctttatttctcagaccagctgacacttagggaaaatagaaaagaacctacgtgaaatatcgggggtgaatttcgactgatagggaatgacctctccagccacccagtaactcaggtcaaacattttggagccatctctgactcttttcttccatttccactctatggtaaaaccatcattaaatcctgccagctttgcattcaaagtatgtgctaacattaaccagttttcccatttcctccactaccaccctagtccatcatcacatctggtcatacaaaggttactctactgcctctcttgtgcatctgtaagctattctctctatgacgaatgaaacagaatcatattcctatttttcagatacttttcaaatacaaatgattttctgttgaatttagaataaaataggaagttcatgttgtggtctgtcaagttctataaaatctggccttcaattaccgtgcccatctatctctcaatctctgctttgctcagtgtgttcaactactccaggctcccactggggttttcaagcacacctccacttcaggcctgtttcactcacatggagtattctcgctcagagctgcatgtttctttgttgtgtttgctcaaatgtcagcttctcagaagactgaatgtgttcaccctcgctgaaatagtaaccgcccttatccattctctatgtccttatcctgcttaaattttctttatagagcttgccattttctgaacatcaattacattatacataacactcctattgatttctttattatctgccttcccacctgaatatatccatacaaacagggcttccactatacaaggctctatcctcagcacctataacagtactaaccatgtagcaaaatccaagaacacattttttgaaataatggattatttcatttgattcttatatgaaattgctaatattattactattaccaaaaaaaacaggtaaaaaataatgaaacaatttttggaaagagataaaataatttaggaaacagggctcatgattgaggattagatgactagcagaggatttaaaaagtgaagaagtagaaataacagagacagatgttttgattttttttaatttctcaatttctttaattttaatattacaaatgaaatattttggggaacaatataccttaattccgtaaattaatattttaaaattaataatctgctttgttaatttccaataaaaattaaaacctatacatgaagatcatttacaaaagatgagaaatgacacagaaaatatagagtgaacactacttaactactcctccacttttctgtttccatgtcagacacatgcctggtttctgacccttgtcagaccaggaacaaattataatttgaaagtagggcataaagcgctggagttgagacttgtaaggatgtaagagcttacaacaaaagaacataggaaagtgtggtgaaggctaaagagaattagaatgcctttccccatttggtgaatgaatagatttttgtgttttgttttagcatatcttcaggcctgaatggaatgctttgtgtagtaaacacagtaaagctcaaatcgagtttactgcctccatatggttccaaccacatacgtacaatggtagattcatggggttggggggggggggcgtttgtcaggggaggacaagtcattttcctagaaaaggcaattgtgtttctagaattttattaagcaagagttcaaaagcaagccagagcaaaaaatcgtactcagaacatcagtttgttggtgcctttccaaaacagcaatttgataaaagtgcatctgcaagtcttttatctgcaaagttaatttcattattgcactatactgtacttaaaaaaaagatccacacatttattaaaattgtaataaatgaatcacttaggctttgatctcctacaccagttttactgagctcccctaaagggagatcaattaagcatacatttttccaccttttaaaataatactctcagacagagcatttgaatttcattttattaaaatgtaggcacagtaaacattataaaaaataaaattcccacaattcacgctattttaaaaaatatcagcaactgtctcatttcattcttgataggaaaaataaaattttagtttgatgatggggttcaggatataatatccccaaatataacagtttggcatgctgaaaactgcagaagcaggaaggtcactctcatcctcttctgcctttcactcctgaagcacatcacaaaacataggaaagattttctgaccttctcctgaagcaggtcataagatattcaggtgaaagataccctccctatattgggaggaaaggaacatccttgtctctgaagaagggtcacacagaagaatctaaacaaacaccctgataagtttccctaatttattacaattaaatcataccaaatttgtccattcatacttttgtacaactgtccactcttcatcaaacctagcacaaaatacacaggtttaactattttttcaggtcttcacttccttacaaaggcctccatgtcaagtaaaacgtatatgaaataccttgtatgcttttctcttgtttattagctattttgttataggaacttcaaccatgaacccagaatgggtgagggaaaggtatttttcccctcctataaagatatttcctaagtgttctctgacacaatacactaaaaactactttatgacacaaccagaagcactaataaaatgttgtgtttctaggaaagtgctctcttcatcaaatgacatgctttcgtagaaaacagaatcttattcaatattgtgagagttttgatttatttgctatagtgtaccattgcttctgtgttccaaaacacaaaacgattcatataataatgaatttgttaaaatgactttccgtaagaaacacacatttattttccagtgcatataaagagcttagttatgagtctgaaagtatcctctatgtacctaggaaggaagttcccccatcaggacaggcaagggaaaaaattctctgtaaatataaccgaatgaaaacaaaaggagacacatcatcagaaatattacatcatacatgcaagatgacaaaatacaatttttgaagtgttattttctttgctacttaaaaatggaatgacggaaattatatggtggctgtgttcttgtcctggctatgaaactaatagggtgactttttcaaactgttttctttctctgttcatctctaataagaagtggctgcagtagatactctttaagatttcttctaactctaaaattctatggattaagtaatttaaacattttcaaaggtattttcatttcttcatatattcttcctgagcttatgacaaattaattctatgttcaagcatttatggacagactcttccaactgaaagaactggtgaatttaatgatcttgaaaaaggaggagaaataggaggaaacacttaacttattactatccaagaatatcctaaaattctactcatttgagcatcttctatgcagccctcataaggtaacaaaaacaaataagcatagaaagtcttggaggaactactgattcctaaataataatgatttatcaaagtaaaattattgttatcaaccagtggaccagttaggggcaccaataaagtaatgagagatttctaactgaaatacattcacttatttaccctgtagcataataaaaacgaacgtaaggaatatacaacattgagagcattgtttcaggtcattttcacatacgattctaattactaaatattccaggatgagaagaaatgactagagataaattatggtgcctattaaaccttttattgaaacctcctttccaaaaattaatatcacatttaatcatcaaaatatcctatctaaaaatttgatttatttagttgtagtctacttccacatggaatttggagtaactgtgtaagacatgaaagaaattctaattgaaaaaaggcagactgggcaaaagataatcagataaactagatgcactacatgtatgtagcttatttgcctctgactcctggtacatatgacaatatatcctgcttgtacacacaatagtaacatatttctgccacaaggaaggacaaagaaggaagcaaaggagagggggaggaaggaaaagttgactaattgcattttaaactgttaccaaacaagaagtgagttacagaaatgaatcaccactactctgaagtttcagcttgtgaataaagttgccctggctgatactgattattttctacttaccattttaactgtcatctttttagcacattaaggctctcttttcatagacctgcagaaaaccggttttactaatccctttcctcccagaatgccttcgctctttatcctggatgtaccctcacttcctgttttttgttattgttgttgttgtttgcttgtgtggtggtgggggaaaaaaaaaaaaacttagaagacattgaaccatatatccaggtttccggaggtgaactaacaaccccaagtttggggtctagccaaccctttcacagatgctggacagatactaagcaaactactgctcacacacctgccatgaataaaattttaaattcatgacaaagggcaacctgaataaacagattctgggtgagaaaataaagaaaatgtgcagagcctaaaacagttatagcagccaatacataaagtatttgctttcagtaagtgccatttctgtttttggttacttctcattcccttatttctcccttttgacaatattttgtttggataagtcatcagcctagctgaaattttattacacagaaaaaaatgaataattaaaaagttatgaccatttcagaaaactaggctttatggaagtaactttaaagtacgtggttttataaataagcatttgtaggaggctgagacaggagaatcgcttgaacctgggaggcagaggatgcagtgagccgagatcatgtcactacagtcctgcctggacgacacaccaagactccgtctcaaaaataaataaataaacaaataaacaaacatttgctcaaaagggactcgggggtatgattctggtattttccctctcacctataaatgttatgcaaatgtattatttttcaaggaggggaatgcccagtactgggagaccacttctccatctagaggagaattttcttgtgccaaggttactgctaagtttgaaatagaaagaaaagtgtgcttagtaagcactgaaatagatcaaaggaatgaaaaaagtcctaagaaatattaattttagactatagtaaaacttaatgaatgaaccttaccgcataagatggaacatactggatagtcactataatatgcatgcctatatctacatacatatctactacatatagatacacacctgtatctagctattttttaaaatagtcacatttttcttgtgatttctttgtttctgcaactcttgatttcctctgattactcttttaactggatctataacctacatctttctctggatattcctctggtaactctccctcttttattcctcatcttctttattccaagttgacaattagtttacctttaccctgattactcagttataatgcctattcttacttcccaagaaaaaaatctacacatttttaaactcatttttgaattgacatataataattgcaaatacttatgagatatatactgatatttctatatgttttatgtacaatgatgagctcaatgtgatcagcatatccatcagttcaaaccttatcatttctttgtgctgggaacattcagtattacacacagaaaagctatccttcaaaaatgaaaaagaaataaaatatttaacagataagcaagaaataaggggattcatcaccatgagaatggccttgcaagaaatgtttaagaaagtctcacatatggaagtgaaaagacaataattaccaacatgaaaacatgcaagactataaaactcactggtagtgtcaatacacaaaggagaaagaaaaaggaataaaatcttatcactatagagaatcacccaattgcaaaaataaaccataagagaggaagtaaagaacaaaggaaatacaaaataaccataaaacaatcagtaaaattacaggaataaatctccacctatcagtagtaaccttcaatctaaatggatttaattcccccttgaaaagatacagactggctgagtggattaaaacaaaaatgacccaaatatatgttgcctacaagaaacccatcttatctgcaaatacacacatagactgaaagtgaagagaagacaaaagatatttcaggcaaataaaaaccaaaagcaagcaggggcagtcatacttacatcagacaaaacagactttaggtcaaaagctgtaaaaagagacaaatctacattttttcttggatttctcggtatgatagaagctagcaatcttcaaaacgtgtataaatctattgccagtcattgacatttcttataagaacctgtgtagttgtctcacgtgggtccgcagctatttatttccaatttcctttccatttaagacctacctatgcagccataaaaaatgatgagttcatgtcctttgtagggacatggatgaagctggaaaccatcattctcagtaaactatcgcaaggacaaaaaaccaaacacagcatgttctcactcataggtgggaattgaacaatgagaacacatggacacaggaaggggaacatcacataccggggactgttgtggggtgggggaaggggggagggatagcattaggatatatacctaatgctaaatgacaagttaatgggtgcagcacaccaacgtggcacatgtatgtatatgtaacaaacctgcacgttgtgcacatgtaccctaaaacttaaagtataataataaaatttaaaaaaaaagacctaccatttgagcaactatagtcttataataaccttctgttactctctatttttctaagtacaccacatactcaaaaggtaagctccttgccccttaatatagttacaaggtttacaaagcttagtttccagcctgtttaaccacttttcaacatcttgcctctgtgcactacaaattctaagttatttgtagttcttcaaatgagtaagtgtctttttgcttgctctaccctcttctccctatgttcccttagctctaattcctattcatattcaagtttcgccttagctgtcttatcctctaggaagcctcctctacctcccaaatctgagttgcttgtgccctatcattactgttcatcactctgtatcgtggctgaccttctaaatgtctatattcacctataatctatgaacaccaatagagcagtgacctgcctatctgatgacaaacataaccccagtgcctaagctcaatgactttacgtattacttaaaagtcataaatgttaaacatttttctctagtgcataaattacaacattagatactataatgagctataactcttcgtctctttttatttcaaaattctattttgtaacaaattactttgtttccatatgcaattggacatgtttttcagataattatcagaagattaatgagcattttctgaaccatttctgaaatacagaaagggtattcaaaaaaaattattgtccaaagaaaaattgatacaatacttatttggaagtcctgaaatctaagagggttaaaaatatgtgtgcctatgacaatttctgaattatttacaaaattttggtgatacaatatagaaactatttacatactttccttatgagttacttatgaaaacaatgttaacataagttactcgaagtgttaggggtttaggaaaattgtgcataataagcacataaccattatacacatcaaaacgtacttttaccttttgtgtgtgtgtgttttatatattatttttctatttttaaatgaagcagatttgagaaattattgattggatagtttttgataaaggataaaagagttagacaggttaaatacacatttttatgggatgcacttttacatgaatgtttctttcttaaactgagtaaatcctgagataaaatattatcaccaaagatatttagctaaattgtggacaaatacatagagtaacagtctgtagacaacagcaaataattatctggaatattcccttcatttcaaaagttttcatcttaggtatattgtttgaatattttattatcaaaaagccaaaatatgatgaaaaagtcataaagtgataaaatcctaagaaaggaaataacagtggaaagaaaaattaatcttgcacagaatagaaggaaaataaataaacgagaagcacacaaataatcaaataaagaaaataatagtagaaaacaataaacctgttttgtatgctgagatttgcctacagtcttcctataaaattctggaaactatatctagaggttgctctttgattgttgctggcaatgtatcatttggttgggaaatacattcacacataaataaaagagatcagttataaagaaaaatacaaatgtcaaatcaattaaacccaagcagtgctccaaatcaaacaaagaagagagtcagagagtagctcaaatgctattatactatctaaaaagaaggggtttacttttgatcctttgtgtatatgactccatagaacctgcctgagctattctgaagctgtgagtggcgatggtgaaggcagatgagaaagcatgacgtgtagagacaaataaagcttgggttcaaattttctccttgctatttagatttttccaggaatttgttttcctaaatacaaaatgaaaataattaaatttggtttgtgtttttgagaattaagtgagataataatcacaaagttgatcactgcagggtatggcatacaatcattacacatcaattcctttcctctcttgcccattactatctatacagggcatcttgaaaacgtatttattaattgtatttcttataatacatcattttaattgtgtataaaatatactcaaagatactaaaagcatcaatataataatttcctaacataacattttagctctttgtaaatatatataaatataaatttataatttacaaattaatagccacaaatgttttcttggaatgtttttataaaacttgtagtcatatacttctattttttatagactgcttttaatttcgtgataatattaaggttatttggtaggacaaatcacatttttttttagttttaggcaattttttcttaaactggaaaaatctgagacatacagtaaatgaaacaaaaatctgagctgtagagtcaatgaaaacaaagtataactaatttgtggaaaggcaaaaattagaacccagcaatgtactattctactaaatatctttagtttccacataaatcatgagttggcatataacatggatagtctgaataaactcttgttacttaactccaatattgccctaatttcaaggagctgatccagaagaggaagatctgagttgggacttcagaccaatggcaagattcaagcctttcatctccatgctttctgcatttctctatagatattcagttgtgaaacacctggagtttatgtgtagttggctcacaccagctgcatttttgaagaaggggtaaaataagcattttgggttagatatgaaaaattttatgcaacaaatgcatatttggaaactgcaaaatgagcatgcaaatcaatttatatgcatcgatgaatgaatatagacgggctattttcaaagtataggcattctagtgtagcataatatatcgggacaaaaggaatgggaaggaggcaaattgctcagcttagtcatccatttgcaatggaaaattgcattgtcaagttccattatgcctgcacaaatttagacaaattaaagagtctactaagtaattattgataacatacatgtgtatgaagtagagcaggaaagttgtgagtcatttggaacttctcagatgtttctaggattttcattagcgaaaggaggcattgaaagaatgataatataccttactatgaaaccaatttgagacacaacactggcctattcagccatatctcttctatggtgacagagatggataacaaccggaaaaagtgtaaataaaacattaacacaaatcactctgctgaggagaaacgttacatctggttctggaccctgcatcttgttaggatcccttcattcattacttcattaccaggagaattattcaatctgacacacgagaccaagttaaaaaaaaaatccttagaattatacaaactttaaatcctatatttctctcttttacagtgtgtgttcagaatatattctgcaaggttactgtggtattctcttctgacaatataaacattctactacgtttaagacagaatgttcaaccaaggataacataaatccctggaaagtcatataatgggtctcatcttctgaaatggactattggtttgacatttcaaacatctcatagataatccctcaagatggagagtcaccaacttcctttgataatctgctcttgcacttataaatatttatccttcaacaatttaaatatgttttttctttaccctcttcactgaaaacagcaaaacacctggtctttacaggttatgtgcctttttatacataaataagtatataaattctattttgcatatatgtgtatgtatttgacatttatttatactcgctaaacgtatttttaacaaacttccataccagttcacaaaacacacctcattcatgttatattgtgagtcattatacacagctctaccataatttatttaatcaaatccatgttaataaacatttggatttgactccatttacttgttttcactattacagacaacatgcaatgagtaccagtgctaatatatttgtgaggcttgttcaggtatttctgtttaaaaccaaagttcctagagatgaaactgttaaaggaaatacacatttacattttcatagttactgttaaactgcctctcaaaagaactataataatacacactccatccaaagatgcacaagagcataagagtgtctacgttgccacacctttcggccaaaactgggtatgatggtcttttctgtgctttttttttttttggtcttgctttgccacccaggctagaggacagtggcacaatcacagttcactgcaacctctaactcccagcctcaagcaatctacctcagcctcaaaaatagcaggaactacaggtgtatgccacaacatctggctaatttttaaaaatgtttttgtatcgcgctttttgcctgggctggtctcaaactcctggcctcaaacaattctctcacttcagcctcccaaagtgctgagattacaggaatgagccaccctgcccagcctgatggcgctttttaatattttcaacaagctaaacaataaatcatatacttcattttaattcacgtctttacttattattgaggtcaagcttctttttatacatttactagctatttgatattctcttttaagaaattgcctacttgttttgtttgaccattaccgacaatattctcttcttaatatcttgcagtgagacccactaacgtttattgaactcctacagtgggccagactctggtagctcttacgtatataaaaggtgtaagtgctcccctggggacttagaatcaagtgaagaaatcagatgggatgataaattactataataaaatgtgttcagcataagaataagggtctacacaaagccagcattgtccctgctggagaaccaggggtgagcaggaagagggtatcagggatgatttcacagagaaggagaccttacagatgggttttaaatgatgggtgaaatttcactcagtagagattcaatggaaggcactaggtccagagagagtaacactagaaagaaccccaagacatgtgaacacaattattattcagaatataaataatgactggcttagatcacaaagtttctgttgaaagaaaatggtaagaaatgagtctggataaggagaccaatttatatacaagtgcttgcctgccattcttgagaatctgtattttatctttcagccaaaggagcagtactatttataaaggatcactccagtagtagagacaaatggctttgaaaggggacaaaaggagcaatgcctgagattgggaaagtggtaagtagactatagcagcaatcctgatgagggagtatgagagcctaaaatagcataatatcaatagaatcaagagaacttggtcacagaaagcatgtgattaatcctttcatctttctacaactagtcacactggatattcatctctgtggcagcatttattgcattgtaatgaaatcatgcatgttgtctaccagcccaccccactaaaatgtgacgctttccaactcttagacctgtagttgaccaaaacgttgtttcaccaaaaaataaactttcaggtttcctcactttccttgtgttcacattttatgctgcaacaaactcagtatttattaatctaaagtctttttttaaaaaaacttagcctctataacattctaatgccttagtgcaaactgttttattttgatatggaagaatccagtgattacagtaatttgaaatgatggtgacttaattaagagtgtgaagcaatccattaactataatttgtaaaaggagccatatgtttttcactcttttaggtataccattggacttgcattttcaaaaagtaaacctgctaatttttgcttcaactgaggatatcattaacaatatcaccagtagcacacatgtgtaccttattacagatcttcatatactataattaatagtgagttttattcgtatttggatgcctgaattgtttagacttgtatttaggtttcaagccctttatttgtgctgtcaaacgtttagtcctcaagggcttgagagcacagaggtgaacactgcctaagacctaacatctcacctcctcctgtgtgatggcttcttaatatgtggttcaggaattatgaatggagaaaaacaacagaggggtcaaagatgaggctagatttctggtttgtgtaactggctttcctgggaaaccaaaaacatgacagaatacccagaaatgcatgtttttcattttgtgagtactataattttttttctctggtttttgttttctttgttttgtttttaacccaaaactatttttctgccctctaatctcatcctcctccaggaacaattcataccagtactaccaaagaccctttcacccaaagctgtatttcacagaggaagaacaattacataggatataaacggactgagatgtaagagacaccactcgaatattctgtggttatgcagcagggcaagaacatcacacctggtggaggtagagtcagtactgggaggataccctggagatggcaaagcaaacaagaggaagtgcaaggtgagtctgcaatacaggcagcggctgtaactcgagctcaaccagctcaacaacgtttaaggaaacatgaaactggggcaatccactgtgtaaagaggacaagggcagctggctcagggcaaacataagcatgtgggtggagagcctgcccagagtgtattccagggacaccaatgtgcaacaacagcaagtcaagtcactgggggaagtaattcatgggccaagtgttctgtaacagttggtgacatattttatgcaaatgtatctgtgaattataacttcagacactcttgaaatagagttgttttttttttttggcagaaattaggttttgtagggggaggggagagtatttgttttgggctttttccaactcaggacttgggagatttgcacgttaaaaggctttcagaaaagtccaattatttacataactacagaactgaaaatatatttcaaatgttacttagtccaggctgctgaccagaaaaagaggaaccttaagcaatttaaaactagcagttgtctatttaagctactaaggatctctagtgatacagattcacccaccacttctgctgacctgttctcacatttatactagaattacaagtgaatgctgttttctctttccttcggcctaaaccagcacaattttgttcaaatccatttccattgtttagtcctctgtggaccagactaccactgccagttttccttagtccaaattcttttttctgtttgtcagctcatatttttctgtcctacttttcctgcttacaaatgcaatgctatcaagatttttccctttatacaattctggactgcctgatctacagacactagtgagagacattttttaagccactagataacaaaaacctatcaagaattttatgaagttcttgtccatgcaatttccaaggcatgatgggaaattagcaagtcagacaaaggcaacagggaaggtgagggggtcactgaaagtgcagtgatgctgctgctgggatgaacagaccaggatgactgtaacacatttttggaactagcctttggaagagcattagccagctgaagtgatagtgggtaaaataaacagagcgggggctattagaggaaggaggctgaatgtcagaccagttgcaaagaacgaggattggaacatttttagctcagtgaagacagcactctttctcttaggcagataaagataattgaagaggatgctaaccatatggattttatttccactgaagacataaaaaaattaatttatgtcagcagagaaaggatattcattaaacttaagggagaaattttctgctcaggaaaagttattaaacagttaaatggaattttgaaaaagagaaaaaatatgacattgcattagcttatacagacttctttgaaacacaggagagattatcctatgtgaaagggtgtggaggatatacagttagttattattttataaataaaaaagaaggaattacaagtgaagagtctggcctcaggatttacgcagctatgattcaaatgtcaggtttgtgaatttctagtgcgtgaattggggaaaattttaaaaatctttctgggccttaattttctcacctatcaaatgagaaaaaagtcacctactttttagggttgtagagtagaccaaatgaattaatagcacaaagagctgaaaatagtgcctgacacactgtgagagccatttaagattttgctattgttgttgatgttgtcagttggcaggaaaaattccaatgatacactgccagaaatgacagctagagacaaagaatgattatattttctgtaggttaaatgtagacaattacgtatttattcttgtcttttccttcctatttccctttttggcttaagcccagagccagaagtcaagcaatgtatgttcctgtcctgtcttctactaaccagatgtgtgattttttaaattttaaaccaacagttctcaatgtcctcattgtttcaaattctgttaactcttctctgtgtctgtctgtctctctctctcaatttactttaatcacaaatactctttttctctcccatcatcttttctcctatctcctgttcctctcttctggtcttctgtctcattttctaaattatcaaacagctcaagcttcccagcttccctgaggcttgagcatctttccatcctccacctcctatgggcagaagacactcagaattgtgtatttggctccagttcaaattgttattgtctctgtttaggatacaaataaggattttgtccaggatggataatgtcttgggtcgaggagaaggaaggtgcccatcattcttctttattgccaagaacctctgggaacatgaacagctcccagctaacagcaggagaggagcaccattcccagaagatttattctaactcctgaagctctacctatgtctgtacttttatgaaggaaatcaatatatagagtcatagaataacaatggataaacttcaagtgaaaaaaaaatatttaaatatcatttgaagtcaaaaaatacattgtgatagaagaaagacatattttaatccaaccatttttaacttaaataaagggtgaacaggacagaggaaaagaaaatgaatgtctaatatattataaaatatatgtaatgatattaactgaaaaatggagcacgtttttaaacttacaagttaccatttgaaaaaaactactttaaatttcatatggaaccaaaacagagcccgtacagccaagaaaatcccaagcaaaaagaacaaagctggaggcatcaagctacctgacttcaaactatactacaaagctacagtaaacaaaacagcatggtactggtaccaaaacagatatatagaccaatggaacagaacagagacctcagaaataatgccacacatctacaaccatctgatctttgacaaacctgacaaaaacaagcaatggggaaaggattccctatttaataaaccataaagatccttgaagaaaacctagacaatatcattcaggacacagacatgggcaaagatttcatgactaaaacaccaaaagcaatggcaacaaaagccaaaattgacatatggggtctaattaaactaaagaggttctgcacagcaaaacaaactaccatcagagtgacaggcaacctgcagaatgggagaaaatttttgaaatctatccatctgacaaagggctaatatccagaatctataaggaacttaaacaaacttacaagaacaaaacaaccccatcaagaagtgagtgaaggatatgaacagacacttttcaaaagaagacatatatgtagccaacaaatatgtgaaaaatagctcatcatcactggtcattagagaaatgcaaatcaaaaccacaatgagataccatgtcatagcagttagaatgacgatcattaaaaagtcaggaaacaacagatgctggagaggatgtggagaaaaagaaacgcttttacacctttggtgggagtttaaattagttcagccattgtagaagacagtgtggtgatttctcaaggatctagaaacagaggtaccatttgacccagcaatctcattactgggtatatacccaaaggattataaatcattctactataaagacacatgcacatatatgtttattgcagcactatgcacaattgcaaagacttgaaaccaacccaaatgcccatcaatgatagactggataaagaaaatgtggcacatatataccatggaatactatgcagtcataaaaaaggatgagttcatgtcctttgcagggacatggatgaagctggaaaccattgttctcagcaaaataacacaggaacagaaaaccaagccctgcatgatctcactaataattgggagttaaataataagaacacatggacacagggaggggaacagcacacactggggcctgtcagggggtgggggtctaggggagggatatcattaggagaaatacctaatatagatgacggattgataggtgcagcaaaccaccatggcacgtgtatacctatataacaaacctacgtgctctgcccgtgtatcccggaacttaaagtataatttaaaaaaataaataaatatcaaaagcaaatatgtgtataggttccctaacttttctgataaaagaggtttctgggattctttttttttttttcttttaagagatagggtcttgctcggttgctcaggctggagtgcagtggcacaataatagcccactgcctcctagaactcctgggatcaagcaatcttcacacctcagcctcctgactagctgggactacaatacacgtatggccaccacatctggcttttttttttttttttttttttttttttttttttttagaaatgaggtctcgcttttttgtcccgcctggtctggtactcttggactcaagtgactctatttgtactcccaaagcactgggattaccttatttcctagaaagttggcagaactttttaaatagacattcataaatgtatactcttacacatttcactgtgcttttgagtagtgaaatacaatatgtaacttcctatatttagaatgttttcaattcagtaaattaaacatttaacatttgtagcatcacgtataattttaaataaataattacattatttgctggaaaataaatcaatttttcaccaaagttaaagagcttaagctgtatagtggtttcttccatacaacaactatagtcatatgctgccatgccagctatttccctaaggagagcccaggcatgcttaattatagaggaacaccattacttagaagaaaaaacatgagtctttaatttccttgtctccgctggacggggctgtggattctgctgaatctagcaatgtctgagtaacacttaagcctagctgtttccatatacgggccaggtgttgcgaggtcccaaacaacagtacctcctaagctctcatcagttgtgtttccatcatggattagaacccacacagaattcattatgtctataattaaatgaagaaagcccttctgatgtcaggatattagtgaagcaactgttcgtcttggcagctccgcttttaacttttggattgccagatccctcctgggaaccaacctaagaaagcactatttgatgtagcagttgttcctgcagtgtggtgtcagtgcatttctaattacagtccagacagttttgagcgtgagtaactagacaagaggccaggtcagcactttggcttgccaggtcagacttattttcctcccacttctttccaataatagtttctcatatatacctgaaatagtacagggcattcatctttccaactctaagaaccactcctaagttcaatttcaagctatgtgttgggaagccaaacacgcttagccaaaaagaggcactatcttctcattacgacatttcaattaagtgcccactgtaccatcatctagattttcagcagaaccatactctaactcagcaactctcattatttatgtgactgagctagttctttatatttgtgctgactcaccacagaggttgatattttcaataattttatcatccaaactctgaaagagatgaaaactttgtgttgcttgttttccaaaataataagtttttcatcaaaaggacaaaaatttgttgtaatattatttagttgcaatattttggggctttactgctggttatgatagagtagaatcaacccatcaagtagaatatgaaaagaaggttaacaaaggaagcaaataaacaagcgttatgaaaacaaagagtgatgaattctgacaagctattccattttctttattatcatgacagtaggaagcagcactaaatgtaagagtctgccacaaccctcaaatctgaatgctttattataagtcagccatttaaaatagtaccaacctgaaaactagtgaacaaacagcccagcatccctttgataagcgaaatatacaagttgtgtcatacaatggacagggctgcctgctaaggtattgggcatacttggacccaaatcccagctctgccatttacgagctactgaacttttagcaagtgatctcttctaactcacagttttctcactgataaaatcgatattttataaaattatcaagtaggactatggtaagactatataagataaggtagacaaagtacactgcataatgcctttcactcgaaaaacactaaatagtaattttaataaaaactactgtgatttttaacagaatgattttaaattattctcaacttcaagaggtgcttatgaccttacctttaaggagaggcatctagtccattttctgaaataacttaatgtataatattttgggggaaaatcatgtatatttgcagatttagaaaatactatgagagttatggttgaactacctggtaatgccttttccaatatccaattactcattcaagtatttactgaactcttacaaaatactcatcattcaattacttaacaattccagcagttgagttgttctaattggaaaacttacattgcctgattgtgttggtaggatttgtgctccgtggatgcaagtgtaaaataagaacctatgttttatttctaaacattataaagaacataaaagtggaaaatgattcaaattcaaacactgtatacagtgtttaaaacagagtactttctctgcttacttttaaaattattcataaataggtctgctctctggaatactccttggatatatgttacaaatatttgacttttatactcaacatttttcaatatagatttccattaaggattactttgtaactaagcttttttgtatattcagtgcattggtattcactgaacagcatttctgttttaatttgaaaggtttttttttttaagttgagggagagtttacatacagtaaagcatatacattttacgtatatagttcagtgaatctttacaaatgtaaccaccacccatatcatgcccaatgctccattgttttgtcctcttctagtcaagaccactaaaaggtacctttatcccaacctctatcatcatagattagttgtatctgttttaaacttcatataaacagaattatatcgtatgcactcatataattgctgccttaaagcacttattttatttgtttaaattttacccaagcggaataagggaaacaatgtcctctttacttagcttgtcataaaatccatattttaaagcataataataagagaactctaccaaatctgatgcatacttctgggcataaatgatctaaaatacatttaaaatgaccccaaagtagatgtaaagaaatatgattcacatttttataatactattagcattcacaacgtcctacagcaatctacctgctaccatttaatatctcccacaaatttttaagctttgaaagagtgtgtatctattatctactcgcaaacaatctgtgaagtaggctggcattagttcacaatatattagtagtctgattaggtggtttcccaattcgcaaccttagaaaatgaaacagaacattgatggtgttattttacttttaacatatattaagatgtaaagtcccacctggaatttagttcttcagattccaaaccatgttctgtttacacacaaaatacaaataatcatgtggcaagaaaggaatctgagagagcatggtactcattccagtattcaagtagaactacatggaatccatgctcaggagaaaaaacaaaaagccttgcaattttctgaacagctctaaagcaactggccaaaattttgttttccaaagctaattagaacattttaagatttacgtattcagcaaaggccgtgtaaatttacctattcctatacttatgaataatgaataaaagaaaaggaactgggccacaaaattatagagaagtacacaacaaaaaaagtataagatttttgcatactgttttttaataaaccaaaaaactttaaaaaatataaaaataatttattctgaattacatcaaatagcttatatactttttgagagcacagtttgcacagcaacttctaataggtttattaaccctgtaataaaatgaaacctgaatatctattgtaaggcctaattttcagtacatatttataggagttaattctgcaaccagtgtagctgaggaaggagtatagaatgtggtcaacgactattttcaggtactaatgtgtctcagagccctggttttcataatgtagctaagaatgacagaaatattatacagtgccagttctttctatagtcaatcaggataactatacttttagtaatcaatttaattcacatttaatgatatccaaaactgaacatatcagtgacatgtatacatatatatatatatacacaattttatgctgaaaaatataacctacttatgataactaaaataacagcttgcttgaacttttaaagccaaatatattacctatcttatctgcagcatatgtgtaaataactttaatgtataagagagtctcaaagacaagttataaattcaataaatcttttttatactaaaactattaaaacttttcctatttgatagacaatgtactataaacttcaaagtaaatggtatcttcaataagctattaatatagtaaaaatcactgcttaaatataaaattgggatggaatacaggtattagtttatgtggaaagtgaaagcatagtttctacatatacttttgtgttaagtgcttgctaaatcacaaaattctcagaatgtgattttttaacatattttgagtaacagctagacatgggtaacattagaacacagctgcatgcaacagaaacagaggctcgttgtctttataaactgaaactttaggcaggtaatggatcattattatactaaaattccttttagacaagaagaagttctatacatttaaattttgcttgaaagtacccctaaagaaaatagtgtcggtggaaatagtcagtgaggtaatagtaacaaaagtaacacgtggacacttacaaaatgcttactatgtgccaggcactaatctaagagattcacatgaagtcacctgcttcattttcttaagagcactaagaagtaagcagtattctcatcccaatttcacagataacacaattgaggaatagaaagtttgagtttgccacttgaaaccaggcagtctggcccaagagtctgtataatttaacctctgcactacaactgcatctcagaataggaaaacaaaatctcaaaataatatatttgactttatttgtggcattttggaatagtaactcagtttttattattacctcatagtcaaaataaactttttaataaacagatgcctttcactgtcatactttaagagtttcccagaatgcttcctctagatcaaaactattgatgagtttctgtgactcagagccttctcaatacaggtgatccaccttttcctacaatggcagacttcaaacaaaactctggcaaaatctctgaatcatttttaaccactatctacttatataataactacttaaatgaaaacaatcttacaaagattacaagcacctacaaaatattttcctttattgtagtagttacaatgttgattcaaacaacaaatatattttgtcactagaacatgtacttgggggtatactataaagtatggcactgtacttggggtatgctataaagtgtggcactgccactgggttccaaagacccataaattcaatgggtgtatctgcaggaaaccacagtacaatccacataaagggttcaggtaatgcttttcataggtagaaccaaagtgttctgaacaatcaatggccttacatttcaacacctaaccaaacccatgatgactttaacttccttcaagaaagaattgtatttttcccctagtttaatctacagcttactgtgggtgcttaacaaatgatgttgactgacaaacagaaaatgtttcctctttctccctggccccctttcaatctgttctctacactgtagctagagtgacattttggaaatataaatgtgataatgccatcttcctccctaccatccacactacactctttgcattactattttatcacttttacagtaaagacaaaaatacttgacatggtccagaaggttgtgcactgcctgaccccactcctctcaagtagggagttagagctccatgcttaaggcattctctcagtggcacatgctgtgccatctcctgcatcagaattctgttcctctgggctttacctgattaatacttttcctctgccttaatttggttaattctttctcactttttcagatttcagtttaataatcactttttattacgtcagctgacactattttaagttttcatagtatcatgcacccatccttcaaaatacataccacagttttaagcttcatttttttaaagtcaatatgccttctcactagaatatgaggtctatgaaagtaataattatttctgcactaccattttattgcttaagcctagtactctggtacacaaaacaatcagtacttgctgaataaagaaattaataaacaaatgaatgaatgaacaaatgaatgaatgagtgaatgtggttgcctatctggtcacattcacaaagtaatggaaagcaggagctttcttaagtcacatgtatcatactgacatgttcagtgacattaaacaatcaggaagcataagccatacgtgtttatggccatttaaatagagaacatgcaaaaaaaagtgaaaacagtccaatgtgggattttaatatacatgactctaaaatgcacgagacctggggatctggaaatcatgagaattataacttaatttcttattgattatccttgttattcttgtttttaaactggatagctatgaaattcactaattctttcaagttgctagggatctatgagtgctcttaagtagaaataatgttcaaggtcatttagatgagaccataacaacggtccaggcacttagatgaaatgaatataaaaaagctatgtaccctgtaagcattcatcactcaggaaaggtgacatttttgcttagttgagttctgaggctgacgctcagggtcaaagaacataagtgatgcataaattagttttgttctatcagccatttttacgtttttttttcccttgaatataacacctgaacctgaaaataatctcaacccgaatgaactggaaatcttatttgccagacgtcaagaaaaagggcttgggaacaaataaaagtgtttatgctcttacccaggttctgccactaacctggtcatcacacataacctttcctggattctctaacaatacataaataaataaaacttgctaggctcaaacacaaagccaggatgaaattgagctcattcaataaaaatattctggaaattcataggtgcataagttgtttcaaggcactcttggctggaggttgggggagagataatatttttattatcttattatagtcttactttttagtagttcttattgtattttaaacatgaaggcagttaaatggtgttaaaattttaaaagtattatagtttggaccagagataaactgaatttgtttaatatttacttgtctgtttttttccctaaattttctcttaatgaagtgaacttatttattttaaaattagtttttatgaagaacatggcagacaatgtacatactggctacaggcagagctttgttgatatttcatctgaatagaaatcatctatccctagccattaatacatgatctgtattgggagaatcatccattctcaattaattattcaatagtcacttgacacacatgaaatagggaaaataagcaaaatggagccaatccttctaggaagactgactctgcctttatcactccatctcccaattctgtgatactcaaaagaatccaatcttttgttttccttctacgtttcgtggtgatcttttgcactccattttcagttcaaattttcaaagtgactcaatgcttcagaagaatcctaatggatttgctattctgagttgaattatcctatgtaccaggcactacactgttcaattatgcatcttggtaattccaaattctttatcttatagaaagagctatccatttgcaaaataaaatgcatttcagatacatctaattctgcttctctttaacaaattactttttccactcttaactgttcctgattatgcatgatctctgaatccctacattaaaaatgcatagaaaaataaaaattttcatttaaaacaccctcccacacagtacaagctgtcattgtgtcatatttgtttcctaatttaaggaaggaagctatatttcatgggtccttcattaaattgccttctctgtattttaaagtggcattaggatacttaagacaattttcccataaaataatgttcattttaaaatttgtttctattaatcagtgcaaaagtatgcaacttcaaattacagtatggaaattatcatatctacctagcatattattcatgattcacaagtagatttgctagaagaaaaaaactatcttttttattttgtaaaacataactgtaaagcctgctctcataaccatagaaatgtactgttaaagctgaagtgctgtataggccatggaatacacagttttctataattacctaagccaaaatataatgaaaaacaaaaacccacatgaagacagagcgcaacaaaatagccctttctttcttcccctcctcctaatcctgtgaaggctacagaagtctcctaaagaccagttttttttcttcctaactaactctccttgctgtttaaacaattacaaatcttatcaagtcttcatttctcttaaagtcaagtgagagagaactgccaactctaataagatttacaaaggctagttccccttagcactgtcagcaaaaatcaaagacattatacaataaaacgcagccacacagagcttttgtccctatagctttcgaaatcagatttaataattcaccttttttcacccatttcagccacaaatgccatttatccatgtgttgattgccttgctttgacccataagctatctactttaaatcctgacatctcctacttagccactgattcgtctttttcacaccactcactcactttctgttagaggctttgctgtatttatacaacagtattttccttggtcattgtcatgtaacagcaccggcaaaacacactgaagaccgaattttatttctaaagaggagaaaagagaacttaggtatgacttttgtagtttaatgccacactgttttaagccccaagaaccacagaaattacaacttggcctccactacccagataaatgtcattagccgaatatccttagaaaatctcttgcaatcccttacatgcatccctgtttattagtctgcagaagcttcccaatccagcaacatctaaatttctctactactttatttctctttataaggcatttgttaattaagaaatcttatttaatctctaacatttttaaacgtcagctgacctcacacttcaagaaaccgcataaatgacaaaattttacttaaatttcacaaatgttggacttggatataacagtggaaaccaacattattccaaaaagcctcctgctaatgaagaaacgcttcacatcctctctttccctttttccacaacgaaaagcaggtttttaccgctctatctgcaaaaggcagagcactgcccgtgaaccctgtctttctcgtcctttaccacgagtgaccagaaccacgtggggattctcaaccacggccgtggtatacctctcctgtgcttcatttctcatcaaacacatgcccaatcttctagatgcttgtttgcatcttaagggcaaagtctgtgtgttacagatttagaagtggtagagacaagtacagtggtcatataggtgggccgcggcccaatatagggcccaacctgccaaagaacccgaggaataagaagaggccattgtatttgccacttggaagggagtagtgttggtagaaaggtctccagaaggaactcaaacttggatatgggggctgccaatccttaggaggatgtcaagggagaagctgtggaggtggtaaggtagagagtcccccagaaacaaggtccttccctcgaagcgaactgccacacgtttgccaagattaggaagaccccatgcaccagcccggtcccctcctccccgagccccgcccaggccccggcccccgtgggtcgggcgtcgggccttaccttggctgcagtccttgccgcggaagccggttcgcgagcagtcgcacacggcctggtcgtccaccacggagcacacacctccgttgaggcacaccccgccctcgccctcctcgcccgcctcgcacgggcttcccccgccgctgttgggcggctcatcgtccagcttcacctcgccgctgtccacgggcaggacctgcgaggagttgaccctcacgtcacgaatccaccccttgaagggctcccgctccctcaccgaggccagggtgagcttgagcgccgcggcgcgcagttccgggggcagccccccgacgaaaaggccgctgaacaccgtcatgtccctgcgcttggacttgacctccacccacttggcctccacctggtcgatgaagagcgtggtgttgcggaactggcggcggatgcgcacgctgtgccaggcgccgtcgttaaccggcgtgtcggccaggagcgtcgcaggctcagcgcagaagatggagaagctgagctgcaggcggccgccgcgcgtcagaatcagctccaggaagtcgcagaagccctcgtcgtcgaagtagagcacgaggccgcgggcgctgcgagtcttgagctggaagctcatctcgctctcgcagcaggcgttccacttggggaagcgcgtccattggccctcggcgcccggaaactccagcccgctgcccagctccgcccagcagcccaggagcagcagcgagaggcacagaagaaaacagcccccgcgctggagcagcgccgtccccatgctcggggctggggtgcggcgggggggtgccggggccgacagggtcaaaatggtcctggacaccgtgacgaagaaataagggtcccgagagacagaaaggtaaggggaaaggcgggagtgagagggatgtgccctcctttatctagttctttttttcttcttcttcttccaataaccccgccctctctccctgtagtcctcttccaactggaaaacgttgaccccagtggtacagggtagccacagaacttccagaccaaagggaggatgcactttggagacaacgttctggaaaaggcttcaacaaaagatcaagggaaagcactgacccatttgagtctgattaactaatttaagagtatctgcagtgtcaacagatacttaactcctcaaatcccattatctgccaggttccaccagtggtaccaggccaaaaggaagcagtgagagtcagtaaaaagaaaacacttttctcaagaaagtacaggaagccagcagtgagccagtatccttggatgcttgtgaatgcctcaagtctgtctccttcagatgtggtgtcttacagcagaacggagaaagggatgcttgcctctttagggcaccatttcttaacccgaggatagcttcaaaggcctgcttcttctgtcatagcatgggcttcagcaccgctgcagccaaagcctaattccttgtgcgtggtctcacaagttggattttacttctcttttcagccacggcaacagtaggactcaaacccagcagttgcgaaatagccagaagctgttagatgtggaaatcgcaacagctcctcttcttttctctctgcctctgcagggccaagctaagatgccagcacatcaattggttgtgtgttggtgatgcattttggttttatcttgtcttttttaaggactcagacatctgcagagaattaaagtcaaaattaaggtctaaagtcaatatagtattatataaatcattattcagctcataacacaagtgtagacctggtcctattagtaaggcaaagagttaaccttcttgtatggagcttttgttatcctcactacaagtaagtcctaacattttctaatagttaatatgacacttttacagtcagccatgacacccttgtagtttattataactgttagttggtaacccgaagttttaaagagaaatttgattatggttatctttttcttttcgcaagatagtttaatttttaaaatatgtgaggggagaacaaatgcttttaaggatttctacctatgttgtgtgcttgttctgtggacagtaaaaatacaacctattcaaatctcagttaagagattttacaattggcaaattagattaaactgttggcaggaagctgccagcttagacttgtatagcattcctgccattttatttttcttagaaggaatattgatggtttcttgatagtctcttgcaaaatttcacacaagtatagttctcctttatattaatgaataatctgttgtaaaagaaaaccactaattggagccagatttatgtttttggcattgtctcaattgccctaatattaacttctctaaaggtgcataaagtatttaatattttgcctaaaagtgtagatctaactcctcctgaagtctgtatcttgctgtcagccctcacaatttgtgtggtcagaagagctgttggcatgtatgtcatctcagctgcagtggctccaggatgctagaatttaaaaccgtacctttgaatcactcactatactattaaatcacttctctttattcaactctaatctgacaggttcttgaaatggtacagaaatcataatcactgatttttttcctaagtcattttttaaccaaaaaattactcttaccttttgaaaaaaattacaaatgtataatctgttcatgtcaaggaagtgcattatttttctcactatttcttatattccccacctcttgcaaacacacacactgcaatatatatacaccatacacacatgcacacacacaccccaaatttattgtctggatgtagaagctcactacccaattaacactttttttcccttacaagctgaaactagcagtaatttatggcaccgcattgtgctgctgcttctccatggggggagctgagagcatttctcttcagtacagagcaatccccacaggtgtcagctgagagccaccaagctagggtatcccacttcaagttcctcccagatgaaattgatgactggttctctctctttcaacacacacacacacacacacacacacacacacacacagtgtgggtgtgcgcacatacacactgcccactagcaaaaggaaataaaaatctcagttgcttatttattatggctgatacattccacaccatcagcaatcaccagtcatatcttgtcttctcctatatcaaacccgaggaaagaggctcgtcaaatcatctgaaatagcatattattcagtatactttcatattttaagtggactcaggaatctgctaaattttcagtcatttgcaaaataaatctggaatatcatgatcaagagtagtgctttgaaccctttctcaagctcatgtgttagaaaacctttttttttttcttgtgtgtgtaactctgttggagccaattattgtattaattaatgttacattgatcacataaccttttttctcccgtccctcctgccctcctccactaatgcacaccttgacaattttaagggatggtggaagagagaaaaaccgtagagcaatatatatgtacatatagatatatatacattcttatcacagggaggttaactggttttcccagttcttggaggaagctcattgtatgtgagcgagtatctgtatttatatggagaaaagaggattctctctaggtgccagaaagacctggccagttcacaaattagaggatgaaataaagggatctgaaaaacatccttactgcagccaaaagaagaagcgctctaattcaaaagcagactaacagcatcattaatcttttctttcatttctagaatcaaattcatcccaagtcactaggaggatcaatacagtacgctcatcggctgcagttgcatattttaatgtttctgatatcacacacacatacacacctacacctttccatgcacccttcaatatatatatatatcttcataaagaacatgaaatctctgagagaaattttagaagtgcttattatttcacccctggcttttgcaaagtctctcaataccaatgcacagccaaaattctctctggctttcccgcccagtctctaagctccatctctaataccagtgcagtttcttggagctcggggtctactgcacaaattaacgatgggcacagtgtggggctgatgaggtagggaaggaaatatatggagagatattttattgctttgatatctagcctgtctcttattttctttcttttgctaatacatcactgcattcagcctttaagttactaccccagttccaccatctcttcttgccatctatttaaaaggcttcatgcaaaacaaccaagatctacactcctccaccctcccaccacccatctttccctgtgtatttgtggcagatcctggctcagttacaatggggaaagatatccttcttcagcttgcctcgccccatcccctccccccaacccaaattgagcttctttacctgcccggttattcccctcagctcgagccagagcctgaagcatgcatcggtcaaagcgaatttcctgaggtctatggataaggcgactgctgctgccttttcagaggcgtcaggcttgagcgtctatctccaggagtgcgggaggggagaacaggcaacggaggggagcaggaggaggaggaggaggagaaggaggaggagggggaggagagggaaagagctgggaaggaaaaggcggtggtggagcctgagaaggctgggttacgtgacgccgggtgctgtccttctgaaagagaagggcggagctgagctctccgcagtaccatggagagcggcgggcccgtcctttggctggggaatgggtgggctcggcccgtggtcgcagcccctccaggtctggatgctgcggagcgaggtgcttttacctttgcatcgtccccttgcagggggagcctgatcctgggggcggggaccttccgcaagcgcttctaacttgtcaccaccctctcttccccatcggaaagaaagaaagagagagagagagagagagagagagagagagagagagagagaacgaacgaacacgaaccagagaaccacgtagcctactgagcatgcccaggcccctgctagacccatggaaagctgtatggagattccacttctccggggtttggtagtgattgggcggggatacctgagagggtgccaggaaagggtccagcagtcaaagagaaggggccaaggagtcgataattatgatgagctctggctttacttgtgcaccttggtctcctgctcggaacccttgaaaagaagctgcagcttttcgaggaatgcaggggcaagcaagactcacacaggcactggcattcttctagatccgatgtcccttgccccaccccttactgtggctctgccttgggtaatcacaacaaatcttcatgacttgcctaggctgtgccaaaaagatgtaaaaggaacccaccagggtaagatgccaacttgcagacgacgatcaactgtgtctgacaaggtgctttttactgcagcctgtcgtcattctccagccttctgtgctctgtcttgaaccaagttttctacctgtttaactcttccctccgtctcctcctcccttttgcagctggtaaaacctggtgaaagtaaaactgggtgtgaggctctaaccatgcaactgggcatgcccaataggcattgctgggtttggtgagaaaggggttaaatctaagggagcttacagattaggtggtagaggagttcggggtctgtggctttaaattatggtttgcaccctatggacatttaaattcctattcctgtatattcctagcctgggttagttttggagcagatacagacatttttattgcaacgccacagacctaatagtctgaacctcaaatactgtaaggcaagactatttttggcctccaggccctatagagcaagaatttaagaactagataaatttgggaacatcaaaataatatatattacaattacaatatgtatattcttccaaaaaactagaactcattcctatgataagccgatttatactttcactacttttgtaaaagggtctaaataacctgaaggcgggtatcacaggttttaatatgtttatcgcccttagagaggcagttttgtcaagtggttacatgtttgggaaatagattgtctgagcttcaattcaatctctgccatttattagttgtaacctcagcaagatacttaatcttatgctgcctcagtcacctcatctgtaaaatggatataataatagctccctcttcatgtgtttgatgttgtgaagatgaaatgaataaataaacataacatatttggaattgtggattccaaattgtggaattttggctatatttatcaactacaacccactctgtgttctgtttgactcaatggaaggaatttctctgaaactcgaattctttgactataaaatagaggtattagtcattgtcagcttattccataagattgctttgggaatgtaatgaaataatagctgtta
